United States Patent Application Publication US 2026/0191916 A1 - sequence listing, part 82

SEQ ID NO: 582 - DNA, 5013454 bp, Blautia FBI02891 (residues 1-1,671,152 of 5,013,454)
  source 1..5013454: mol_type = genomic DNA
cttacattaggatagttctctgaataatgcgaactctgccaagcccaggcagggattcctcagatccgggaagctttttggcagaaccggagattgtatcctattatatgaacataggaaaggagaaattcatgagttactcatttaccagtaaagtccgctacagcgagatggatgcccagggacatttatctctccacggcgttttaaactattttcaggactgctgtacctttcattcagagtcagtgggacagggaatggaagtattaaaggaaagaaaaaaagggtgggttctgtcagcctggcagatcgtgctggagcgttatccctctctgggcgaggagctggtgatcaccacctggccttatgattttaaaggatttctggggtcccgtaatttcactctttctaccgtgcagggagaacggctggcctacgccaataccctgtggacccacatgagtacggtcaccggacttcccgcaaagctggaagaagaggacatcaagggatatgtgctggatcctaagctggacatggactatgcttccagaaagatcaaacttccacagggcggtgataagggcatgccctttcctgtgattgtggaatatctggataccaatcatcatgtgaataatgcccagtatgttgccctggcccagaggtatctgccagaaacctttacggttggccagatgcgcgcagaatataagaaacaggccatgctgggagatctattgatcccggttgtttataaggtagaaaatggttatattatggcattggacggggaagatgaaaagccctatgcagttgtagaatttttggagaaagcttcaggcagataaaaaggagagcgtatgatcgaattaggaaaaaaacaaagactaacggtggcaaagactgtggatttcggtgtatatctggcagaggagggcggcgagaacaaagaagagaaagttcttctccctgcaaagcaggttcctccgggtaccaaggacggagattccctggaggtttttatttataaagattcaaaggaccggctcatcgccaccaccaaggaacctcgtttatgtctgggagaggccggactgctcaaggtggtacaggtgacaaagatcggtgcatttttagactggggcctggaaaaagacctgctccttcctttccacgagcagacctaccgggtgcgggaaggtgaggaatgtctggctgccgtttatgtagataagagtcagagactgtgtgctaccatgaacgtgtatccctatctgtccaccagaactccttatgtggtaggtgaccaggtaaaagggcgggtataccagaccagtgataattttggtgtgtttgtggcagtggatgacaagtattccgccctgatccccagaagagaggcccagggaaaataccgtcccggagagatcctggacctgcgggtgacggatgtgaaggaagacggaaagatggacgtaacgccccggcagaaggtccatatccagattcatgaggatgcagagctggtgatgaaggtgattgacgaatttgctggcgtgcttccttttgatgacaaggtatccccccaagtgatcgaaagagaattcgggctgagcaaaaacgcctttaaaagggcagtgggacatcttctcaaggaagggaagattgagatcaaagagcggagaatttataaaaaataaaggagaaaacaccatggaatttacccatctgcatgtgcatacagaatatagtctgctggacggctccaataaaatcaaagaatatgtggccagagtaaaagagctgggaatggacagtgctgccattacagaccatggagtaatgtatggtgtaattgatttttataaagcagccaaggaggcgggcattaaccccattctgggctgtgaggtctatgtggcgccaggctccaggtttgaccgggaggcgggcacaggggaagaccgttattaccatctggttctccttgcagagaacaatgaaggttatcagaatcttatgaagattgtgtccaaaggttttgtggaggggttttactataaaccccgcgtggacctggagcttttgcagcagtaccatggggggatcatcgccctaagtgcctgcctggcaggagaggtctccagatttttggaaagagggatgtacgaggatgccaaggctgccgctctgcggtacctggatattttcggtgaaggaaattatttcttggagcttcaggatcatggcatcccggctcagcagaccgtaaaccagcagatgatgcgtcttcatgaggagacggggatccctttggtggccaccaatgatgtgcactatacctatgcccaggatgtggattcccatgatattcttctgtgtctgcagactggaaagaagctgtccgatgaaaaccgcatgcgctatgagggcggacaatattatgtgaaatctccccaggagatggcacagcttttcccctatgccctggaggcattggagaatacccataagattgcccagcgctgtcatgtggatattgagtttggtgttaccaagctccccaaatacgatgttccccagggctatacctcttgggaatatttgaacaagctttgttatgagggacttcaggagcggtatgatccagtaacccaggagctgcaggaccggctgaagtatgagctggataccattcagaatatggggtatgtagactattttctcattgtctgggattttataaaatacgccagagaccatgatattattgtggggcctggccgaggctcagcggcgggaagtctggtggcctatacattggggatcacccagctggaccccattaaatacgacctgctgtttgaacgtttcctgaatccggagcgtgtgtccatgccagatattgatgtggatttctgttttgaacgccgccaggaagtgattgattatgtgtctgagaaatatggaaaagaccgggtggttcagatcgtaaccttcggtaccctggctgccagaggtgtgatccgggatgtgggccgggtgctggacatgccttatgcccaggtggataccatagctaaaatgatccccacagagctgaatattaccattgaccgggccctgtccatgaatccggagctgcgcagaacctatgaggaggacatggagatccatcatcttattgatatggccaagcggctggaaggacttccccgccattcctccatgcatgcggcgggcgtggtgatcagccgtacggatgtggatgaatatgtgcctctttcccgggcggcagacggttccatcaccacccagtttaccatgaccaccctggaagagctgggacttttgaaaatggatttcttagggctgcgcaccctgaccgtgatccagaatgcagtgaagctggcagaaaaggacaaggggattgtcctggatatggatcacattgactatgatgacaagaaggttctggattctcttggcactgggaagacagacggggtgttccagcttgaaagtgcggggatgaagagctttatgaaggagctgaagccccacagcctggaggatgtgatcgcaggtatctccctgtaccgtcccggccccatggactttatcccacagtatatccggggaaagaaccgtccggacaccatccggtatgactgcccggccctggagcctattttaaagccaacctacggctgtatcgtataccaggaacaggttatgcagatcgtacagaatctggcaggctacacccttggacgaagtgacctggtgcgccgtgccatgagcaagaagaaggccgctgtgatggaaaaggagcgccagaatttcgtgtatggcaatgaggcagaaggggtgcccggctgtattgccaatggcatccccgagcaggtggcaaacaaaatttatgatgaaatgattgattttgccaagtatgcctttaataaatctcatgcggcggcctatgcagttgtggcctatcagaccgcttatctgaagtattattatcctgtggaatacatggcggcacttatgacctctgtgatcgattttcccgccaaggtggcagaatatatccttgtgtgcagacagatgggaatccagattttacctccggatattaactgcggagactatagtttttctgtagatggaaacaatatccgatatggattaaatgccatcaaaagcatcggccgtccagtggtggacgccatcattgaggagcgctgccttcgggggccctacaagaacctgaaggatttcgtatccaggctcaccaacaaggagattaacaagagaacgctggagaatttcataaagtcgggagccatggactgtctggagggcaaccgcaggcagaaaatgcaagcgtatcccatgatcatggattctgtgatcaatgacaagaaaaacaccatggcaggccagcttaccttatttgatattgtcagtgaggaggacaagaaggactttgagattcagatgcccaaggttccggaatatgataaggagcttatcctggcctttgaaaaggaggttctgggcatatatctaagcggccatcctttggaccgtttccgggataccctggagaaaaatgtcactgcccacagcacagatttccttcctgatgaggagacaggactacccaaggtgacagacggccagagggcagtagtgggcggaatgataaccgagaaaaccattaaatatacgaaaaataataaggtcatggccttccttaccttggaggatctggttggtactatggaaatcgttgtattttccagaaattatgaaaaagaccagcatcttctcaaggaggacgctaaggtatttatacaaggacgtgtgtctgcggaggaagagaggcccagtaagctgatctatgagagcctgcgccccttcagtgatatccccagggagctgtggatccagtttgccaacaagcaggattttatggagcatgagcaggaattataccaggatctgcgggattcagacggaaacagccaggtggtgatcttcctgaaggatgtaaaagctgtgaaaaagctgccccccaaccggaatatattaattgaagagcctcttctggaacggctgcaaaaaaaatatggtccggggaatgttaaagttgtagaaagagtattgaaaaacttgggaaaatgaattaaactaaatgcgaatatatgaaagataaaaatggaaagtgtgacggttcattttgagtttctgagatactcagaatgagaattgaattaacaaaatggaggaaagcaattatggcagagaagaaaatccacacaattggcgtattaaccagtggcggtgacgcaccgggaatgaatgcggcaattcgggcagttgtaagaaggggcttgagcaatggcttaaatgtaaaggggatttacaaaggctacaatggattgttaaatgaggaaatcattgacatgactgccagagatgtatccgacactatacaaagaggcggcacggtgctttacacagcccgctgtgcagaattccggactccggaaggacagcagaggggtgcggaagtgtgcagaaagcatgggattgaaggcctgatcgtaatcggcggcgacggttcctttgcaggtgcacagaagcttgctgctctgggcattaacaccgtaggtattccgggaaccatcgacctggatattgcctgtacagaatataccattggatttgacacagcagtaaatacggctatggaagccattgacaaggtacgtgacacctccacctcccatgagcgttgcagcattattgaggttatgggccggggagccggacatttggctctgtggtgcggcattgccaatggagccgaggacgtgctgatccctgaaaaatatgactatgatgagcagagattgatcaacaatattattcagagccgtaagctgggcaaaaagcatcatattatcattaatgcagagggaattggacattcagaggcaatggcaaaacgaattgaagctgccacaggcattgagacacgagccaccatactgggccacatgcagcgagggggaagccccacctgtaaggaccgtgtatatgcttccactatgggggcgctggctgttgaccttctggttcagggcaaatcctgccgtgtagttgcttatcgtcatggagagtatgtggactttgatattaatgaggcactggctatgaataagagtgtttccgaatatcagtgggaggtatgtaattccctttctcataactatgataagcatgggaaaaataagagataatcatgttgaaaaagataaaagctaaggcggtaaaattaaatactgcacaaataatcgccctcggttttgcgggggtgatttttgtaggtgcgcttcttctgtggctgccctttgctacggttccaggtgagagcacttcctttgtggatgctctcttcacagccaccacctgtgtgtgcgtaacaggtctggtaaccgtcaccacggcagtccattggacgatatttggcaagatcattatcctgatactcatccagcttggaggaatcggggttatctccatggttatgctcttcttcatgatcaccggaaagaaaatcaacatgaagggccggaggatgatccaggagtcctataatctggacaaattgggtggtatggttaaggttatccgaaagatcgcgctgtgtgtttttggggcagaggctgtgggcgccgtgtgttatgccttttgttttgttcccgaatttgggctggcccagggaattgcccagtctgttttcacatccgtatctgccttttgtaatgcgggaattgatatattaagcacagacagcctggcaccttatgtggggaatgttctggtaaatctcaccaccatgggtctgatcatcatggcaggtctgggctttggcgtgtggtgggatctgggaggaaacctgaagcggatcctgaaaaaagaaacaccacccggccgtctgtggaagaatcttcgtctgcacaccaagatggttctggtgatgacaggtgttcttgtcctgggcggggctatacttatctttatttttgagtttcataatccaaagacagtgggaaatttatccatgggcacaaaggtcctggcttccttttttcagtccgttaccacccgtacagcaggatttttgacagttgaccagggagcccttacagatcaaagctccattgtttcattggtgctcatgtttatcggcggttcccctatgggtacagcaggtggtattaagaccaccacctttctggtgcttttgctggcagtggctgctagtctgcggggaaaaagagatgtggaggtctttaacaggaagctcagggatgcttatatccgttcagcagtagtgatcggagctctgggaatggggatcgtttttgtgatgaccatcttgttgtctctgaccacagacgctcctttgatggatgtggtctacgagatcacgtctgctgtgggaacggtgggactttccagaggcctgacctctacactgacaggtgcgggtaaactcatcgtaattcttaccatgtatcttggaaggatcggtcccgtcactttgggaactgctttggtaatgaaaaatttggtgcagccggagaacaaacatctggcggaagaaaatatcatgattggctgataaggagtgcattatgaaaaaatcgaaatcctatgcagtgatcggtcttggaaaattcggcatgagccttgccaggacacttgcagaaggaaacaatgacgtattggtggtggatgacaatgaagacaatatccaggaaatccaggatctagtcacctatgcggtaaaggcagatgtgacggagcctggggcaatggaaagtctgggaatcggcaacgtggacgtggcagtgatcgccatctctgaaaatatggaggccagcattacagccacaattctggcaaaggatgcccaggtgccctttgttatggcaaaagcccttaccccccttcatggaaggattctggagcgggtaggggcagataaggtgatcaacccagaatcctctacaggcatccgggtggctaaaaatcttatgtccggccagtttctggacctttttgagctatctccggatttcagcatggtggaattccatatgcccggagagtgggccggaaggtcactggcagatctgggagtccgggaacgatacaatttaaatgtgatcggcttgaagcagggggaggatgtaaatgtgaacattgatccccatgagcccctgccggcacagtccaccattattctggtgggaaataaccaggatttaaatgctttttcaagggacagggattaaagatgatcaccagtgcaaataataatcaggtaaaaaatattatacatttaaaccaaaagacaaaagcccggaaagaccaagggctttttgttgcagaagggcggaaaatgtttcatgaggctcccaggcagtggatttggaaggtttacatatcccagaccctttcccaggaccaggaatttatgaaaagtgttcaaggcctggactgtgaagtggtggcggacggggttttccggcagatgagcgacacccagacgcctcagggggtgcttacccttctgaaaagaccggaatacaccctggagcaggtgctgaggggagataatcctctggtcctggtgctggaggaccttcaggatccgggaaatgtgggaaccatctttcgcaccgcagagggagcaggggtaaatggaatccttctcacgaaaaatacagtggatatttttaatccgaaagtcattcgctctaccatgggctctatttacagaatccctttcttctatggggaagatgtggtattcttagtacaagagctgaaacagagaaatatccggacctatgcagcccatctactggggaaaaacagttatgaccaggagtgctaccaggagggaactgctttcctcattggcaatgaaggaaatggactgactgacagggcagctggtgaggcagataggtatatccgtattcccatgtgcggccaggtagagtctcttaatgcagccatggctgcgggaattcttatgtatgaagctgcaaggcagcgaagatgctgctaaaccttggaaagggggagttgtatggaacccataatctggcttgttatattggcagtttttttgatcattgaagcggtcacggcggggctgactaccatctggtttgccggaggcgcattggtggcgggaatcgcggcgttttttgatgccagtgtgctgtttcagctcctgctgttttttgtggtttctcttgccctgctgatcttcaccaggcctatggctgtgagatttatgaacaagggcgtggaaaagacaaatgtgaacagcatgatcggaaaaagagccattgtcacagaagagatcgataacctgaagggcactggaaaggtgacgattcaggatattgactggcttgcaagaaacaggcaggaagacgctgtcatccccgcccatcaggtggtgaaggtggtggaggtaaaaggagtaaccttaatagtagaagagaataaggaggagacaaaatgacaggaattattttattggcagtacttattgttctggtattgtggatcttggcatcctgtatccgtattgtgccccaggcctatgcggtagtattggagcggctgggagcctaccgggctacctggggaaccggcattcattttaaagtgccttttattgagcgggtggcaaggaaggtgaatctaaaggaacaggtagtggatttcccgccccagccagtaatcaccaaggacaatgtaacgatgcagattgatacagttgtctttttccagatcacagatcctaagctgtacgcctatggagtggaaaaccccattatggccattgaaaatctgtctgccaccactctgagaaatattatcggtgatatggagctggatgaaacccttacctcccgtgaagtgattaatacaaaaatgcgggcttccctggacattgcaaccgatccctgggggatcaaggtaaaccgcgtggagctgaaaaacattattcctcccgcagccatccaggatgccatggagaagcagatgaaggcagagcgtgagcgccgtgagtccattctgatcgcagagggtgagaaacggtccacaattcttgtggcagaaggtaagaagcagtccgtgatcttggatgcagaggcggagaagcaggctgccatcctccgggcagaggctcagaaggagcgtatgatccgtgaggcagaaggccaggctgaagccgtattaaaggtgcaggaagccaacgcagaaggtcttcgtatgatcaaggcggcaggggctgacaacgcagttcttaccttaaagagtctggaagcactggctaaaatggcagatggcaaatctaccaagattattgttccgtccgacattcagggaattgcagggcttgccacctctctgaaggaaattataaaaaatgatgatgcagcccaataaaaaggagccggaacatgaaacctgtcattgatttatccagggaatacggtctggtgctggaaggcgggggcgccaaaggcgcctaccagatcggcgcctgcaaggccttgctggaagcaggtgtgaagattaagggagtttcaggaaccagtgtgggcgccttaaacggcgctttgatctgtatgggagatatggagaaggcccagcagatatgggagagtatctcttattcccaggtcatggatgtggatgacactgtgatgaagaagcttctctccctgaagctgaagcccggggaatttctggaatacagcctgaacattataaaaaacggaggcctggatgtgacgcctctgcgtcagctcattgaggaggtcattgacgaggaggctatccgaaggtcttccatggatttttttgtacagaccttctgtgtcagcgattttcaggagctgcatgtggatatgaaggaaatcgaagaggacaccatgaaggatatgcttcttgccagtgcctatatgtttccggtctttaagacagagaagcttcggggaaaaacctatattgacggtggcatttccgataatgtgcccattgatgcgcttttggaaaaggattataaggacattatcatgatccgcatttacggcattggggtgatcaagcctgtgaaggtgccggaggatgtacaggtgataaccatagcacccagggcggatctggggaatattatggactttgatccggagaagagccggaagaatctcattattggctattttgatgccatgagggaaatctatggcttaaagggcagagtctactatctggacgatcctcatgatccggatttttatctgaatcgtctgatctccatgagggggcaggaagagaatatccggcgctatgtagagaaggtcctgcccaggctggcgctggagctgcgcctggggccagaatgggactatgatcttttgtatctgtctatgctggaagccagcgcacggatcttaaaggtacccaagtaccgcatttatacagtggaggagcttcagatcgcagtgaaggaaaacagctttaaagaaatggagcaggagccacttcccaaatttgtacagatgatcatcaacagttaacaggaggatattatgaatttaaaaggacgtcattttcttacattgaaggattatacaccccaggagatcctgtatctgctggatcttgcagcagatttaaaagccaagaaaaaggcagggatacccacggaatattatagagggaaaaacatagccctgatctttgagaaaaccagcacccgtacccgctgtgcatttgaagtagcagcccacgatcttggaatgggaagcacctatctggatccatcaggctctcagattggaaaaaaagaaagcattgccgacacggcgcgggttttgggaagaatgtacgagggtattgaatacaggggctttggccaggaaattgtggaggagctggcgaaatacgcaggagttccggtgtggaatggtctgaccaatgaatatcatcctacgcagatgctggctgatatgcttaccatccgtgagcattttggaaagcttcagggaattaagctggtgtacatgggagatgcccgctataacatgggaaattctctcatgatcgcctgtgcaaagctgggaatgcactttgtggcctgcaccacacagaaatacttccccaatgaggaactggtagagcagtgccgggaatatgccaaggaatccggggcgaccatcactctcactgaggatgtggaggctggaaccaaggatgcggatgttatttatacagatgtgtgggtatccatgggcgagcctgacgcggtgtgggaagagcgtatccgtgagctcacaccttataaggtgacaaagaaggttatggaaaatgctggagagcaggccattttccttcactgtctgcctgccttccatgacctgaagaccaccatcggaaaagaaatgggacagcgtttcagcctggcagatatggaagtcacggacgaagtgttcgagtccagccagtctaaggtctttgatgaggcagaaaaccgtatgcacaccatcaaggctgtgatcgtggcaacattgggagagcctgcacaggcataaagctgccgtttacagggagacatgctgcctggtgcataacaatagaaatatgcaggacagtggcgtgcaggaacagcgtcaggcaggaacaggaaggttgtggacaacgtggataactttaacgagaaaacaatttcatgtgtattacatacaaaatgggcgggcaaaaccgtctattttgctgaagagacggattccaccaatctttgggcaaaaaaactggccaaagacggggcacctcatggcaccctggcagtggcggaggagcagagcgcaggccggggccgtctgggaagaacatggactgctcccagaggctcttctgtgatgatgactctggtgttaagaccagattttaaaccctgctatgggtccatgctcaccctgctcatgggactgtctgtggcccaggcctgtgagaggctggggctggacgccaagatcaaatggcccaatgacgtggtgctggcaggaaaaaaaatctgtgggatcctcacagagatgagcgctgacccggacaccattcactatgtggtcattggaacagggatcaatgtaaatattagagaaatgccccaggagatccgggaaatggcaacctcccttcagctggagctgggaagaacgctggacagaaatgaagtgctgggccgggtgctggaagcctttgagacaaattaccagctgtttacgcagagtctggatctgtctctggtccagagggaatacaaccagcttctcataaactgcggaaagaaagtgaaggttcttgatcctgccggggaatataccggagtttcccaggggatcaatgagcaaggggagctgcttgtgaactgtgcggacggaaccataaagagtatcagctccggggaagtgtccgtgcgaggactttatggatatgtataaaggagaatggctaagatgtatcaggataaaattgtactttgcggggcaagtgcctatgagcagaaatattattttaaccaggacttttcctcccttcccgatggggtgaaaaaggaactgcagatcatgtgtgttctctatactgaggaggtaggggggatcctgaccctggagtttgatcaggatggaacccttgcgtttaaaaccgaggccctggaggcagacgcacggtatgatgagatcggcagcgctctgcgtatcaagcagctcaggcaggagaaaaaagagcttttggagtctttggaaatgtattacagggtattttttctgggagaagtgcctgatgaaagcggggaatagcctatggacaaaaaatggaacatcgggaaggtagttcttgacaatccctttgtgctggcgcctatggctggagttacggatctgcccttccgaagattatgcaaggagcagggctgtggactcatctgtatggagatgatcagtgcaaaggcgatctcctatcacaataaaaatacacaggctcttatggagatccatgaggaggagcaccctgtatccatgcagctttttggctctgagccggagcttatcgcagaggtggcaaaatccattgaggacaggccctttgacatattggacatcaatatgggctgtcctgtgccaaaggtggtgaacaatggtgagggttctgcccttttgaaggatccccagctgatccgcagcatagtcaccagtgtatcccgggcgatccaaaagcctgtgacagtaaaggtgcgcattggctttgaaaactatccggtggatgtggtggagatcgctaagatcgtggaggattccggggcggcggccattgcggtccatgggcggaccaggcagcagtattattcaggaaaggctgactgggatgccatccgaagagtcaaggaggctgtgaccataccggttattggaaacggagacgtagattcccccttaaaggcagaggcccttaggaaggagacaggctgtgacggggtcatggtgggccgggccgttcagggaaacccttggctgttccgggagctcaaccattatttttccacaggggagcttttggcaaggccctctgtggaggaagtccgggtgatgattctacgccacgcccgtatgcagatagagttaaagggtgaaaatactggtatgcgtgagatgcgcaagcatgtggcctggtacacggcaggcatgccccattccgccaggctgcgcagggaagtgaaccagatttccagttatgaagagctggaaaagctgttggaaaagctatgaggtgacagtctcttaaatcttcaggaattttgagaggcttttgttgcttcccatgacaaagagactttctcctggcttgaaaatatgttccggccgtgggagagggtctaattgtccctcatatttaatggccagaatattaatatggtgaacctggcgtacttttaattccacaatggatttaccgatccaatggtccggaacctgtacctcataaatggaatattcattggtgagctgcacataatcaaacacatgatccgctgtataccgcacagccgcccaggtggccatctgtctttccggatagatcacgctgtcagcgccgttgcggagcagaaattttgcatgcacgtctctgctggccctggagagaacaaattttgccccatggtcctttaaaagggcggtggtttccagagaactctggaaattgtctccaatggccacaatacataaatcaaaatttctaacgcccagggagtcaataaacttttcatgggtggaatccccaatctgagcatttgtcacaaaggggagaatatcgttcaccctctcttcgttgatgtctatggcaagtacctcatgctttaactcctgaagctttctggcaatatgtctgccaaaacgtcccaagccaattaacagtacagatttcatcttctaattttcctcctatcagccgattgtaattttttcttgcggcatctggtaaacaggcgtggaataagggttggataccgcatagatcaaagtcagaccgcccacacgtccaaaaaacattaaagagatcaaaatgatctgcgatgccgttcccaaatcaggggtgacacccaaggaaagccccacggttccaattgccgaggcagcttcaaagagcgcggacatcagaggtattccttctatatagcagatagcaaagcctccgcttaaaaataagatcacatataataaaaataaggttactgcatggcgcagaatttctggcggaaatcttcttccaaaacactgaatgctgctcttattccgaaaaacagccctcacacagaggaaaaaggtagccagggtggtggtcttaaagcctcctgccgtggagctgggtgagccgccgatgatcatcagcaggatgattaggaaaatggtaggggcggaggccagagtcaagtccacggtgttaaagcctgccgtacgaggggtcaccgtctgaaaaagggaagcccagaagcgttccccgtctccggagaaattccatacgctgcggccaaattccgcaaaataaaatacaatggcagggatcacgatgagcagcccggtggtgatcaataccagcttggtgtgaagacggtatctgtggaattttaaccggttggtccgcaggtcatcccacacgaaaaatccaattcctcccaaaatgatcaggcccatgatggtaagattgatcaaagggtccctggaatattccgttaaagaggaaaaggggacatccttgcccatcaggtcaaagcctgcgttacagaaggcggacacggaatggaagaaggaataccacaatcctttaataaatcccatcgcagggcagaaacgcagggacaacagcagggttcccacagcctcgatgagaaaggtggtctttaggataaaaccagtcagacggacaatcccgcccacctggggggcagaaatggattcctgcatgatgtagcgctggttcaggccgatcctttttccagtaaaaattgccacagcaatagccattgttaccacacccattccgcctacctgaatgaggagcaatagcacagcctggccaaaagtggtccaataggaaaaggtatcatggagtaccagtcccgtcacacaggtggcagaggtggatgtaaacaaggcatccagaaaattcgctccttccccgtccttagtggcaatgggaagcataagcagcaaagctccaaacaaaatcgtacatccaaaaccagccacaatgatctggcttggcaggatgcggtggtgtttaaataacatggagattccctccgataatttatgatctaggttcaatgtctagaggatagaatagcacatttatactggaacttcaatgtcaggaatatggaaaagagtaaagattttcagtgaataaaaatggcagctatggtatactgaggtaaaccgtactgccatttttggtagtacctgcaaatgtcagctgcctttagttgaaaggggaataaggcggcctttacaaatggacgcagggtctgtaaaagatgggcgaggaggatgaagaaaatgaaaaaaggaaggagaaagcttttttggctgctgacagcaggcatgttgctgtcaagtgctgcttctatggacgtttcggcgggacaggagggagcagaacagctggaggaagcacagcaggcagaagcaatgccccttatggcaatggaaggagagcaggaggtctttttccaggaggacgtgccagaggaaatgcacaaagaggagatccctaacgaagaatggaaggggcaggacattacacaggaggcgcagggtgctttcaatgaggatgaaagctctttggtccttgatgctttgccagaagccggggaggatcacaccgctgttttcggggatgagctgcgcacagatccagcccaggaaaccgctttaaaaggcgcttgtgtatcagcccaggaatttcagcattggaaacgcaccggccaggttcctcagagctgttatgaacaatgggcagggaattccatggaggaggccctggaattccttcagaaccaggatgtgggcggcacaaacacctatattcttatggctgctgaggaaatggagtctttagagcagatggaaatcccttcaggcattactgttggatttgccatggacaattttcctattaaagtgttcagcctggactgttatggggagttagttgtgaaatgtgagatagagacccagggccgcgtctttctaaacacccagggaggcagcctggaatttgcaggagcctatgtggatggtgttttagacggacgggactggcagggaaatgcttctggcaggataaagtttaccggaaccaactacgtgggtgggatccagaacgtggatacctgcgacctgggacaggaacaggagtttgacaagttatgccttgtgaatgaggtccagtcccagttttatacaattgtgggtgaggggaacaaggatatttccataaaaggctatgatcaggacaggctgcctgtgtttaaccaggattttgacctgagaaaggcctcagagactgacaccggccagcgtccctataaaatccgcatctcttacggcacagaccctagggaaggcctggatagagatatagagctcaataccggacaaaagctggcagcttttccagagacggcggacgccctcagtcttcaaactaaggtgtcctatcattcaggagcggacgggatttcctatgatacggattatgacggagtgctcttccaaagcagtcagggtatggcggcctatcatgtgtgggcttttaccggcaaagatggcaaaagtgcagaggaatggtttcatgcttatggacaggatcaggaagggaagggcatagaggagcttggcacaggaaccagaagtatggaaacagccctaaggctgctggatctggctcagaacaccggagccggagaaggctattatgtgctgaccccgcctttaacaggaaagatcggttctgtcacggtaccccagaatgtgagaggactgaaaattgaaagtcccttcaggggagaggatcaaagacagatccccctgatcctcaccgatgtgaccgtgggcagcggtcaggagctggggcttgtgggcatatttacttcaacggcccaggaactgaagttgtacgggacaggaagggtatctctgttaaactgcagaatgaatcagaagctaacagcccaggcagatttaaatatagcaggacaatgtgctataaaaagcgtgacggcagggaacatgagcctgaaagagggatgtgctctggccgtggaggaacttttgcaggcagataccctgaaagggtcatcagtaagccttgtgcttttggacagcgccaaaatgcaaataggaacactggataaacggccgcaggggcaggagagtggcggattatttcagatcttccgcttggtaaatggcgggaaggctgcagatatttttcttgagaaggctgtgaattttggcagtgattctggtgaggagggcagggaattaaacttgctgtcagttgtaaacgttgacaggggaaaggctgtgatggacggcgctcccatagccggagatttatacgcctttgactatcatatctgggaggagcagaagcagcccagccaatatttatggacctatgaaggagaacttatgcggctgctttgcctgggaacaggggcggcagaggattttctgtgggatcatacagtttttctgttttctgatgaggaaggacaggaaaccgctgtgcatttgactgcaggggagcgttatggggaactgcttaaggcggctcttcccggttaccagcctacgttgttggtgaacggagagacccggtacaccacatggatggaaaacaaagatggaagcattcagaagtgcggcgcctacatatccgtagcaggcggacagcaggccatcagccaggccgtagtcagcggtatcggaacttcctattatacggggaaggccattaccaagaatgtatcagttaagcgaaacggaaaaatcctcacaaagggtaaggactacacggtcacctacaagaacaatacaaaagtaggaaccgccacggtgattatcactggaattggctcctatacgggaaccatcacgaaaaccttccagattatctacagggttccagccaagggaagcacctatacagtgggagccttgaaatataaggttacaaaagcagcctccgcaaacggaaccgtacaggtgacagctccaaagcagaagtcttgtaccgggatcaccattccctccacagtaaaaatcaaaggatatacctttaaagtaaccacccttgcatccaatgcctttaagggctgcacaaaactgaaaaaagtagtgatcggaaacaatgttacccatatttatacaggggcgttttatggagacagccagctttcctccataaaacttggatccggtgtcactcatatttatggaaaggtgttctacggatgcaaaaacctgagaaccatcaccgtcacctcttcaaggctgaaggctgtaaacaaaatagccttttccggaatatatgcaaaggcggtcatcaaggttccctcagccaggctctctgcctataaaaagctgctgaagggaaaaggaatggcttccacggtgaagatcacaaaaatctaatgctgccttaaaataaatcgtataattcatggacttctatgatatactacagtagcttaaggtaaaaacacaagaaaaagggtgaaactttgaaaaaaccaggaaaaccgggaaaactcgggacttgttatcttgacaagggtgggggttttggttataatagtgaaattatgaaatagtggactctttttgtggatgcataaatattgaaagggagttaaggtatcatggaagagaaaaaaaatttactgacctatgcaggattgaaaaagcttgaagaagaactgcatgatttaaaagtagttaaaagaaaagaagtggcagaaaagatcaaggaagccagagagcagggggacttatctgaaaatgcagagtacgatgctgcaaaggatgaacagcgtgatattgaggcccggattgaagaaattgaaaaaatcctcaaaaatgcagaggtcgtagtagaagatgaagtggacctggaaaagatcaatgtgggatgtaaagtcaaggtacacgactatgagtttgaagaagatatggaatttaagattgtaggctccacagaggccaacagcctgcagggcaagatatccaacgaatcccctgtgggaagagcactgatcggcgcaaaaaccggagatatcgtggaggtagaaatgcctgccggtgtgatgaaatataaagtgctgaatattgagagaaacatttaaccgcagcaggcagccaggcggattgggaattttccatggatccgtgtggggcagccaggaaggttgtggagaatccgttaataaatagaattaaaggaggcataagacagtggcagaacaaaagaagccgcagcaggaacaggatttgaaccagcttctgaagatacgccgggagaaattggcagagcttcaggaaaacggaaaggacccatttcaaatcgtaaaatatgacgtaacccatcacagccaggaaatcaaggataattttgaggagctggaaacaaagaccataactgtggcagggcggatgatgtccaaacgtgttatgggaaaagcatctttttgccatgtgcaggacctgcagggaaccattcagtcctatgtggcaagggacagcgtgggtgaagagccatataaagaattcaagaagttagatgtgggcgatattatcggtatcaaaggggaagtcttcaggaccaaaaccggagaaatttctattcatgcagcggaagtgactttgctttccaagagccttcaggttctcccggagaaattccacggtcttaccaacacagacctgcgctaccgtcagagatatgtagatttgatcatgaatgcagaggtaaaggatacctttatcaaacgttcgaaaatcatcagcagtatccgtaaatacctggatgcccagggctttatggaggtagagacccctatgctggtatccaatgccggaggcgctgcagccaggccctttgagacgcattttaatgcgttggacgaggattttaagcttcgtatttcactggaattgtatttaaagagactgatcgtaggcggcatggagcgggtgtacgaaatcggccgggtattcagaaatgaaggtctggacaccagacacaacccggaatttacattaatggagctgtatcaggcttacacagactacaatggtatgatggaccttacagaaaatctgtaccgtcatgtggcccaggaggttctgggaacgactaccattacctataacggaattgaaatggatctgggcaagccctttgaaagaatcaccatggtggatgctgtgaagaagtatgcaggagttgatttcaatgaaatcaaaaccacagaggaagctaaggccctggcaaaggaaaaaggaattgcatttgaagacagacataaaaaaggtgatatcttaagcctgttctttgaggaatacgtagaagagcatctggttcagcccacctttgtcatggatcatcccattgagatctcacctctcaccaagaagaaaccggacaaccccgagtacacggagcgtttcgagttctttatgaatggctgggagatggccaatgcatactctgaattaaatgaccccattgaccagagagccagattccaggctcaggaagagcttttcgcccagggtgacgaggaagccaaccacacggatgaggacttcctgaatgcactgtcgatcggtatgcctcccacaggcggcatcggatttggcattgaccggatggtcatgctgctcacagactctgcagccatcagagacgtgctgctgttccccaccatgaagactcttggtggttctgacagcccgaagaaggcagcgccggctgctgaggcggcccctgcaccagcagtagaagaagctcccattgatttttccaatgtgaagatcgagccgctttttgaagaatttgtagattttgacacgttctctaagagcgatttcagagcggttaaggtaaaagcctgtgaggctgttccaaagagtaaaaaacttctgaagttcaccctggatgatggatcaggcacagaccgtaccattttaagtggaattcatgagtactaccagccagaagagctggttggaaagacctgtattgccatcgtaaacctgcccccaaggcccatgatgggtattgattcctgcggtatgctcatttccgcagtgcatgaggtggatggaaaagaaggactgaatcttctcatggtggataacaggattcctgcaggagcgaaattatattaaatgatatgtgatcataaagaataagggactggtgcaccaatggatttggaaagatccattgggtgcaacagtccttttttgactattttcttatattcaggccagtgttttggaaggtattatatttttataaattcttcccatatgctataaaaccttgaggatacagttgatttgtacaacagagattatgtaccaggattcctttgaatgcttaactgctctaccgtctccggaattttatcagggctgagcaagggaagggtgagaaggattctggtgccatgccccagtttgctttctacctgaatctgctcctgccctttgtacagatagtgaagacgcatgaaaacgttataggtcccaatgtgatccacaggagtttcttgtttttgaactgtgccagagttaaaatactgttctatagtctcttgggacatacctgctccattatcggtaatttcaatgtacagccaatttggctgtgaggtgtatagggaaacggtaatttctgcgcagtagggactgccatcgtccagaacaggatcctggcataaaattccatgcttgattgaattttccaccagcggctggataatatttttagggattaaaatatcataatctgctgcatcagccaagaaggagaagttaattttttcactgataagaaaacgttggattatcatatattgcttaatggtttcttcttctgcttgtacagtatcaaaaattttatagtttttcagtttcatgcgatcctttagggtggcaattaatgcatcattgacggtaaccacatcctcatttcggcccatttcggcaaggacagtaactgtattcagcgtattataaatataatgtgggtcaatagccgaaaccattaatgtatattgcattcgggcttcgttttccatgtcttcccgtattttctgaagcataatataaaaagtattagccagactgctgatctcgtcattaccatggtcattgatcgtgacattatagtccccggctctcacttgattcatttttctttctaatttgcccaagcgatgaagtgtgcttttggtgctaatgtaaaacagaaaaaggagcagaagaataatgaaaccaaacaaggcctgaaaataccaaaaaacttggcggtatggcttcaacagtgtggaaaagggcaggtgaaccgcaatacgatagtcttcatttttataggtacatagagtcataaaaagaattccgtctttattttcataagtacaggtttcatattgttttccttgaaacatatattccggacaggtggaaagcgtaattgcggaggattcagattgattttgataaatgacatttccgttgcagcaaatgagaaaatcatccatatcaaaggatttaaattcccagaattgctgaagaatatcatttaaatgcacagcatttaccgcaaaacagtttaggctgcctactttaaaggaagcaaccatgcacagaatagtctgtgatgggtcatcaggtgaagtcattattggcggatgggtgaaacaatattgggttttatctaattttttgtaccaatcggaggaaaagaaaatatcagccgcccaggaagaacctggatgataaaaagtatcgccctgatcagtaaagatcatgtagtagtgatttgaaataatatatccgttatcatcatgttctctacctgaagagtggattgtgtttgttacaggtagataggacaaaatttcagctctcagttcctcttggctgcttttatcttccgtatacttaagcagaagctgatgaaatgcagaattatgctccagctcattcagagcagtattgttgtgccagatataactctgtctcagtgcgccggagtgcactacactggaaatttgttttaccagatagggcttcataacataacaaaaaatagtaggaaaaagactactgacaataaatagacaggtaagcccgaatacaagcatcagagccataatttttttagtgacagtattaaatttcatgttctgcctcctttatccaaggaagaaccggtcgacaggttggtatgactccggcggtattccaggggagattggtgataggtttccctaaatactttggaaaagtaggaaacactgttatagccggtcatactgcaaatatcggataccttgtattgttcttcacgcagcagctttttagctttttccatacgtactttgatcattaatttccagagcgtttccccggtttcttttttaaaaagtgtgttaaggcggtttgcgctgatttttaactgtgcggcaatccactctacacttaaatcgctgttcatataatagttgttaacgcagcaaatggcattctgtacaactgcagagtagggggcttgcggagtacaggagagaattcggtacagggcagcgtatttttctttcatccattgatagatggaaggggcatcataccagctaaagtgggaaagagtatcatttattgaaaaagtgtctccgtttgccggatctatcgtttttccacagtactgcataagtgcggacaggaagttagtggtaagctgcgaaaaaagccggtaatcccgggattccatacagttaatgtaattttgatccagcagttgattgatctcgtcaaagcgtcgctggttaatgagttccggaatggagggaagtgccaattgaagacgtgcagcccgggggcggctcaaatattgggcatgaaggaccgagctatccggataaaatatagcctgctgtagagaatctctgttgtgagtataggcaaaggcacactgggatattgggctgtcttccgaaaatattacgattgaaaagcttagtgaaaagtaatctttcagctgccggagtaattgataagaaaattccgtcacagatccgccaggtttccgcagtacaaaaaagtgatatggtgcagtttgaagaactgctcttatagtatcacaactttgtgttaaaaaatttgtcatctgctgggcgttaagctgtttctcatccagtgaaaaggcgctggaaaacgccggatgaatatggctttgccggatcatcaaaagatcatagcggtcaggcagactgatttcatattctgtgagagcagcatgagggttcacatcaagggtctggatcagtgcacgaaaagaggcatcagcagcgtaatatctgttaagccggcgtttttgaagttcatgggttcccgtttgaatggcggagcaaagctgggcttttttggtttgatgctttagtagatatccaaatacatttaactccaatgcagattttacataagcgaattcttcatagctggagagaaaatataccagagtatccggagcagcttccatgattttccgggtgagatctattccggtcattcttggcatctgaacgtctgtaataaccatttcaggacgatatttctcaaaaagacaccatgcccgcataccgtcacgggcggataaaacctgatcaaaaccataatccttccagtttaacaggctggtaaagtattccaagatcaaaggattgtcatcggcgaacagcagcttcataatacttatcccctccatttttctgttccaaagatagttaattatatcatgaaaaaaagagacggtcaaaattgaaaagtaaaattagataaaaaagaaggcggataagagaataatattggtaattttataaaaaacacgtttttttatacctatagattaaaaatacaaaaaagaagaaaataaaggagaaatctttcctttttctgtaatagaaaaagtactatgataaatccacaagatagcgtaaggaaagtaaatgactttctgatcacaaagaaaaaggagagaaaaaaatgaagagaaaaaaaatagctgaaattgcagttgcagctttggcagcttcttgcctgatgaccagcaatgtgccagtcatggcagaagagaagacggccgaaactacagaagtccagcatacggcccaatcatccacattgatggtaggtgcagcggtgcgagacattacccctagtgatgatatgctgccattgacaagaaaacctgaagttaccatgacagctgtagcagaccccattagtgttcgtgcaattgtactgcaggatgatgatactaccacattgatggtaagttctgaaaccggaagatctcttggaccgatcgtggcacaaaaaattgcagattatacaggcctgtcactggatgatattgtattaacttctacccatactcatgctgctccagagattacggaggacattgatctggatttcgctgagaatgattcagaagtgacgaatttgcagcgatggggaaaatttgcgctggagcaggtatattctgcaattgatgaggcaatggaaaatctaaagccggcaacggtaggtattggttattctgaaagctatattaatgtaaaccgtatggtagactatgacgcagttgatgaggagacaggagaggctactgtaaatcatagctttggctacaatggagcaggagtttctgacaaaacattggcagcgatccagtttaatgatatggatggaaacccaattgcttttattgtaaactatagtgtgcacggtacagtcatgcatgcgaatactatggcagatggtgacactgccattagtgcagacattccaggtattgtttcaggatatctggaggataatcatgagggtgcagttgctatgtggctcagcggcgcagcaggtgaccagaatccaatcgttcagaatgatatgtatacggcagatccggcaaccggtgagtatgaggagacattccttgccaattatgatatcctgacttacttgtcaaagatccattatcaggatattgaagatgcactggaaaatatagaagtatttgaggcagacgctgatctgcaggatggtttctacgagatgacgattcccacctcagagaaaggcaaggaaaagtatggagatgattatccgatcacaatgcagatggttcgtattggggatattggattggcttgctactccggagaattgtatacacgaagcggactttatttaaaggataatgcattgttggatgataccctggtggtaaaccactgctggcagagggattatcaaaacaatggatatactgctgatgatgttactagagaatttacaggaaatggagaccgcctgccctatgccacaggatactttaatgaggcacttggtgagatgatgaaccagttttatctggatacgggaacatggatcgaccaagaaaacggcactgctgtttattccaccacgaatgaagtgactattatcggtatggatggaattgcgggtacagaggatgataatcaggttgtaaacccggcaggagatgtactatacacagacgtgaaagtagaatttgatgaagagggtaatccttttgtttcacttcctggtgatctggtactcactgcaggggaggataagaaaatcggaacaacagatgacgtagtatctttcggcagttatcagcaaagcgaacatattgaggacggcgcatcagccagtgcgcttaactggttcattcttgaggcagaggatggcaaggcaactttggtcacttcaagtgtagtggatggtatacagtttaatctgagcgatgcagatggaaacgaatgggagaccagtaacatccgttcatggatgaatagtcaaggtggtcagaatattgctggcgatacggcaggcttctacgatactgcttttacggaagatgagaagaagagaatattgctcacggatgtatcaatgaattcagattcctcttactgggcatataatactcttctgaaggaaaactggtggggagaatataccacagaaggtatcgacacccaggattatgtatatgcactcagcggtgaggaagtagtgaaatactttggaccgagcaagatagccactcaggaagaattagggcatgatcctaagtattataccaatggtatgtgtggagcaaccggttgggctgtgaaattaggagttaagaccaatagtggcggaaatggaaactcctacatcggatatgcggattcctggactcgctcaaagggagcgatcgatgagaatggtgagcttagctgtggggtattccttggttccgtaggctcactgaatgtaggacgttctgtaactcgaacctatggtgcacgaccggtaattacaatcagtattgactaaataaggttaaacctaggaaacaatgagtttacctaaatatatgattcagcaataacttttaaacggagattttaaataagaggaagatgtttgcttttgagagcagcatctttctctttttctttaagggattatcctacaacgggcaatactttgctaatttgtaggaaatcccatatgccctaatcgttcagcttctgtaaaatttatcagctttttgtttatcttttcattttctataaccagtattttttgattccgataacaaaaatttgtgcttttcaagcctgcacctataataccatccccagaaaatcattccagctcctaaaataagcgcaaatgtttttgcggccgtatcaggtgtttccaataaagtgaataatatgcccatacctgcactgcttattaaatcgctcacatactttctggtctgcgtttgtttatcgcgatttaacaaatctacaattgtaatctccgattgttcctgaacgttttctgtttgaagtttttcacccctcaatagctccgttaccgtaatatccaagatgtcacacaattccagcataatagaggcatcgggcattgctctcccggtttcccatttcgatacagcccgattggtgatatttaatttttctgcaagctgcatttgggtaagattcttctccttgcggcactgagcgataaatgttcctgttttcgtttgattcataataatcatctcctctcccacaaaataagtatatcagaaaaagcttttttagaaaaagaactcctggtggatttggttatttttttttaaatctaccaatggtagaatacttatttaggtgggtcaattccaggtatacgttccagtgtatttactctgcagcggcgaatcacaaattaaagaaacatagctgactggaaccaggaaatcactttggttaatagatacaagcggggctgtgaaaaaatggtgtcaattcaactccatttttccagtcctttttttgttgctctgttgtataagaaattttgtcactgttctttatagtatgaaaattgctatatttttttcttaataaccttaaacattaaaaaatgagtacaaatattaaaaaagacggatagaaaatgaagtaaatatgacggataatagaaccatcaacagggaatacagtgacaaattgaacaaaagaacaaaaacagccagacaaagctttcttatgggagaaaaacaattttttcagtgtatgccttgtagaacggaaaaaaagtatatggtgaggagataaccatgcccgatgatgtttttgatcagtgtgagactctgcaggaaattatcagtgcatttcttggatttttaaattctctctgcaagtacgcccagaggcagcggatcaaaaatgtggattctgtaaaatatataactgatcgaatgctggctcaggactgcgcaaatgtatcccttgacacagtggctaaccgctgtaatatccatcggaattatctaagtattctatttaaggaaaaggtgggaatgaattttaaggactatgttctcaattacaagatgcgcagagccaggcagatgttgtgcagttcaaatgtcaaaaccagccagattgcagaggaactgggctacacagatgttaagaatttctcgagagcatttaaggcttttacaggccagtctccgtcagattacaggaatcagataaatggggaaaaagggacggattaaccgtgccccagagagaacttttttgaggaaagctatgtgaaagggaatttatctctcaatatagtttgtgtgaaatggtatctttggggcctgaaattatgaatattttttagaggatggtatcctgtcaggcgtgattctgtataaaatgacgaaattgaaaaaatacttacataagacaagagaaacaattataataaacaaaggataaatatatacagtgtatgacgcagtgagattgcatacgagcagtagaaatcgcaacgagttaggtgattctgctgcttttttgtttgttaaaaagcccatacaactgtaaaaacgaggaggaaactatgccgcagaataaaaaagaaagtctgatctataccgtaatgatgtgtttcactatggtactctggatgagtatgtacaatgttagtcttcatatgggaggttttactatggagacgttaaaggagggatggctgggatttcccatggcctatctttatgccatgctttttgactggtttctggtatccagaccagcaaaggctgttgccttccgcttttttgtaaagccagagagcagcacatggaaaaaggtgattgctgtgtcatgctgcatggtagttcccatggtgatcaccatgtccctgtatgggggactggaggcctgtgtaaaaagtggaagttggaatcaattgttgattatctggctcacaaatattccaaagaatattattatggccttgcccttccagctgattattgcaggcccgctggtaagaactgtgttccgaagagtatttccagtaggtaccataacagaaagaatgcattctcccagaaacataccagtggataatagctaaatattaaggcggcagtgaaagccgtctataccaatgaaagccagcgggggttacttcgccggctttcatcggtcaaataatgtatctaccccgtttttaccgtttaatatcgtaattcatattcatcaagttccgaatggtaggggcatcgtcaatgatacttgcatcgccatgtatggtgtgcttgatggcgctgcttgcaactgcgaaattgaccatatcttcggcattatagccatgcagcatggcatagatcaatccggatgcaaaggcgtcccctccgcctacccggtccagaatattaaaggtaaataatttgctttcaacagtctggccttcataccacatataagccttcagactgttttcgctgccgctatgggcatatcttacatgccttgcaatgcatttcaggttgggatatttatttacaaatgcttgaaatatttcatcctgctgtttaaagtctggctgcatgggcacaccgtctttataatcccctttttcgtgatccttgtcatctctccacagatgatagggttcgattcccagaagaacgtccacatagggcagacattttgtacagtagtcccttgcttcctcccagctccacagggtacttcggaagttcccgtcaaagcttacgatcaggcccttgtcttttgcttttttcataaggtctaatacgaattttcgacagttttcacccaatgcgggggtaattccgctcaaatgaatccagtcaaagccgtccaggagacggtctatgtccacggaagaaaagtcatattccgtgatggcgctgtgttttctgtcgtaagttaccttgcttgcacgaatcccaaagccggtttccagataataggtgcctaaacgatgggtgggagtctcctccggggtactcaggatcacaggctggcaatgtacgtcgttgcttcggagcatgcgcaccgcactttttcccaggctgttatctggcacaacggtaaaaaaggtgctgtcgattcccagattagccagggaaagagcgatatttgcttcgctgcccccatagctggcctgaaacgtattagccattcttattttttcataattgggcggtgacagccggagcataatttcaccaactgcgagaaactttgggtgagcttttccatttaataatccatcatttttttcttccatacgtatacctcactttccctatgcaatgcctgcgcattgcttactgatcagccaacagttaatccaactggttattccaatgaattgatgtatgcactgtctttgtcggaagttatcagacaattatattatacagaacagattctttgtatgtcaactacaggtatttccatttggaattattaggaaaaaagataaatgtgtgcaagagctgggagaaggcagcgagtttgtacatataagtaaagccgccgaggaatccagaagaaacctcggcggccttattttaaagaatgatcataacttttgaagtatctgtttcacccttcaccaggcggcgaaggagttcacaaatatccctttgactgtaattattaatatgagcttctgcacatcagcagggggtatcaatcaataataaaatcaatattctggtttaagcagcacatacgtttacggcctgcataccacggtttcctcttgttaaatcataggatacggactgaccgtcttccagagatttgtaaccgtcgcagcagatgcctgagaaatgtacgaatacgtcagatccgtcttctcctgtaataaatccaaaacctttttctgagttaaaccattttactgtacctttattcatgaaagatacctcctaatttttttgtgcattttataaaaacaaaaaacgcacataacagtaaatcattaataaaagaatgacttacggatacatgcgaaatcaaggctttatcaaaacactttctaaagcttaccacagaaaagaccgtaagtcaagggaattttaagaattttcaaaaaattattttgccccatcctttgcctgtgggccggggatgcacccaggcatggtgaagctccagggctttttttggaagctaagggtagcgccaccgttcacgtccaccgtttcacctaccatgtagtttgacatgtctgtacacattgcgaaaactgccagggccacttcatcgggattcatggctacgggagtatcagcgcccagaaccatttgatcctggagaagttctgggccatagtaggcggcagcttttccagtattgatcattgctccttcagagagcattcctccgggggcaacgcagtttaccgtaatgccgtactggcgcagctcttttgcaacgcccattgtcatactggcaacagcgcctttggctgcattgtaatggctcatcatgccaatgccattggaatcgctggaatgccgggcagccgaggaggtgaacacgatcttgcctttgatcttgttttttaccatagagcgtgcagcggcctgggccataaaatactcaccctttaagtcagtattcatcaccttgtcatattcctcttccggcatatccaggaatgagaacatgctccaggtggcggcatttgccacaagaatatctacttttccatatattttttctgtaaaagaaacagtttcgtagcaggaggccacacttgtcacatctgcctgaaaccaggtgacgtcccggcctttgctgcgaaattcgctttccgctttttttcctttggtttcattgcgggatgcaatgacaacttgaacaccggcttcgctgagccggtttaccacattatagccaagcccggaggcgcccccggtgacaatggctgtttttcccttcatgttgtttatgaaaacatcactgaggcttggcacacaggaagcattgccagaagccatatttgcaatcatttctggggaaatcgctggccttttattatccataagaattttcctttctggtattctgttattttagagttatggggtaaaattactaaaaaattagtattttaaaatgtctttttatgggatataataaaatactgaaaattaagtagattgagtttgatttatagaaagtcgatggcttccaatgaaagagattacatatgcttttcccaagattaaagacattgatccttcctgttatattgatgtttataacctgattctggaatgcagtcaggcacacagtcccagaagctttaccatcaagcttttggatcttatggggaaaatctgtgcgtttgatcaggcaatggcattttttctggatgccaacggaaaggtttccggtaaatatatacttaatgtgaaggataaatgggtggatgagtacctgaatcattatctgggcaatgaggaatgtcctgaggaattcagcctctatcgggatattaatgaaaaatcaacaggatatcctttttcccatattgtgaattggtctgaaattacgccgtcagcttttttaaaagaatatattaagcaacaggggctaaaatattcctggggattctgcttttttgatctgaatggcgcttaccgggtagtgatctcactggacagaattcaggatagaccttttgcagaagcagaacggaatcgtctgaagctggcactgcccattctcaataatctatatcggaattttttctatcagggaaccgattcggatccccgcaaaatgcagtcaagctggagtgtctacaactttacaaaaagagagaccgaaatcgcgaatctgctgtgtcagggcatgagtatccaaaatatcagccatgccttgtatattgcaaaaacgactacctacaagcacattgcccacatttatgaaaagacgggtgtatcctcccagcaggagctgttatttaaaatcatgaacctgcaaaatacataatctgggacttctttaggaaacatggggaagggaatggtctgcagatcaaaggcgtccaatcccttcccgtttccgttgatttttagaagttgtccatcattttgttgaatttctccagctcttctggattcatatggtagccattcttatcctcaggataagcgcctgtacgtacatcatttgcccatgcaccataagcctggcacaaaaatggcatcagctgggcataaacttttgcgtgggaagcaggcttgggcatcataccaaaggtgtccatatccaccatttctgaaccgtcacagggtgcacctgccgcgatggataccacaggaaccctcagcttttcagcaattgtctgggagacttctatgggggtgagctcaatggtcataccgcccataccgttttcctgatactcatatccccatttgaaaattcgaaatgcatcttctgctgtttttcctacttttttgtatccggtggcgtttgtctgccagccggagatagcgccgatatggccataagtaggaacgtagttgtctgacataaatttcaaaatctcatttgtgacccccatggcaagcatggagtcagcgccgttgcgtacccattctgcgccccaccggacagcctcagctttgtccacataagtagcagtaggcatataccagttgatgtgaataatattggtgtattcacggtatttacgaatggttaaggttccggtgcgcagctcgtcctccagatccgtgccagaccggatgcttagcatactgggagtacgaagaatatcgcagcctgcaagctctgcggccataccgaaaacaggtcccagttcggcagggcacatctgaacgattttttcaccgttgtctttcattttctgaagataagccagactctttcttgattttgaagcggttgacattttaatgtttttttcttccatttttacctccttatttagtaagccgttactgtggtatgtccttatataagtaatatagcgggtgaatagttgaaataaaatactaaaacttcagtatttataagcaatagaaagaaaaatactgaaaatttagcatatactttgaaactgacgaatactaaaatttaagtattggatattgatgtagatattatataatgatttattataacttcaggtattcgggaggaatcaatacatgaagatcacttatggcatagacctgcgaagaaaaatgttcgcgggtattaatattctggcagatacagtgaagggcactcttgggcccaaaggacgtaatgtggctatgcagcaaaaagcaaatctaagagacgcagattattccgataatgccccgtcaagcgcgcacatactcattaccaatgatggcgctgctgtagccaggagtcttgtattaaaagatcccatagaaaatcagggccttcaattggcaaaggaagcggccataaaaaccaatgataccgccggtgacgggacaaccacggcaatcgtgttaacacaggcactgctgcgggaggcatttcggtttatagaaggcggcgcagaacctctggccatccgccggggcatgaaaaaagcggccgaagtcgttgaacaggagctgaaaaagatggcacagccaatctgtacacaggaggagatctccagggccgccacagtttcctgccaggaggaagagctggggaaactgatcggacaggcactgtcaacggtgggaatggaaggggtaattaccgtagaggaaggcggacgcatggaaaccaccatggatgttcaagagggtattatttttgacagaggctttatcaaccctctcatgtgtacagatgaaaaacataagacagcagagctggatgatccctatattcttttctgcgattataaatttatcaattatcaggatattcttcctgttctgatcctggcagcggaggatgggcgtccctgcctcatcgtctcagaaggagtggagggcagcgcccttggtgtgatcttgaaaaaccgcctggaaggcgacatgcaggtagtctgtgtgaatgccccggagtatggggatggacggcggtggagaatggaggatcttgcgctccagaccggaggggtttatgtgaccaaggatttttatacagatatccggaaagtcacccgggatatgctgggaaccgctgatcatgttaaggtgacaggcagtcagaccatgatcaccggagcccatggcagcaaaaaagcagtggaggaccgcatccgggagcttcgttatctggcagctcatacagattatgagtttaaccggaatcgatataaggaacgcctggcaaaatttgtttctggtgttgtccatatccaggtaggaggccagacagaaccggaaatgtgggaacggaaaatgcgggtggaggatgccgtcaatgcagcaagggcagcctgtgaggaagggattgttccgggagggggaatcgctcttttgaacatcacccctaaaataaaagactatgcccgtaagctgaagggggaggagcagctgggagcagaagcagtataccaggcgctgaaagcacctgcacagcagatttttgaaaatgccggaattcctggcagggctatggtggaagccttgttggtccagcatcctcaaaaaggatatgatctggaaactggacaatatgtagatatgcttgcagcaggcattgccgatcctttaaaggttacacggctggcttttcaaaatgctgtgtctgtggcaggaacggttgcaaccatggaggctggtctcattggaaaaggaaaacagaagaatgacaaatagtagaatagacagggaagagaaaatcaaaaaatttattatggagtatccccttcaggtgccagaggaggcagtggataaggaacttcattatattcgtttggaaatgcgccatcggatgcagtatgacacacttacgggcggccgtctccacttgaatccccagggggaactggaagagattaaggatgagctttaccaggcagcattttatgaagccaagtatgatctggtgataaaggatgtgatctccagagagaactttgtggtcacaaaggaggagctggaaaaagaagcgctggccatggcacagaggcaaaattgttctgtggaattggtccggcagttttttggcagtgagctgacaatgcttgagacagatattaagaaacaaaaagcagagaattggattgtggaacaattttctgccatggtgtagattccatacaaatactaaaggggctgtgaaaaagtggattaatcgaactccatttttccagccccttttattaaaattttgatcaagctattttccgtttataaatctggattgaaaaagcaaatgcagcaagggatatccccacacaccaggccaatgcggtccagagactgcaattattatttcttcttcggctcgccttccgggaagatgatcttgaatacaaagaagaagatcaccatggagacaccgcctgtgatgacagtaaccaggatattgtagattgccggtgaaacatgagcggcggcaatgggcatccacagattgttaaagccgttgcagatcaaggagatcacaacccaggcgataaaataccacatggcctgatacaccgggttgccatggcttttaaatgtaaggtttctctggagagggaagttgatacactgtgcaaggaaggtacccagccagtagctgatggtatatcccagtcctccgccgataaccactgcgcccagtgcgtcataatggatcggagtaccgatgaggctccaggtaaaatccacgccaaaaaggctcatggccacctgaggcaccataaattccgtgccggccagtcccatgcccaggatccctggaaggaatgtaaatacaaggtactggaaaattgtcacgccgttactgaaaataaaaaacaaacctacttgataaatccactttgccagtttcggatgcttgtcggaaaatggaccccatatccccatccatgcttctttcactgctcccatttcatagtcctcctttatgtatgtggcagaatgatctgctctacctgtttatttgcctgacagcttccgctcataggctttgttggctttcccgtttgcaaagaatccgccgatgatttgtttcatgccccgcaggaaatggccgttgacggtatccaccatgccatggaccatatccatgctcactgcgccgttggtcattttggcgatgcctcggaagggcatattatagatgaacaatatattaagatccggcttgccttttgcctcgcttttcttcttcatgtttgtcagaatgcggtagatgagccttgccagaccgcttctagcataatacatttggcagatggcatcattttctgtcaggaggccggaccactttccctgggggatgggatgtcccagaagtgcggcgaactccttgtcttccaccttctggatcaaaccattatagtaggacggtatctgctggggatcataggggaattcggtggtggttccctgaacatccatgctgccctccagacggatatcggatacacatgtacccaccaaaatgcggtagctgccgccctctacctcccagtgattggtctttacgttccaatagcggaaggttttatcatcaaagggaatccgcacctctttgctttcccctgccttgaggaacactttgcagaagcccttcagctccttctccggacggaaaaccttggcttgggggagagatacgtacatctggggtacctccgcaccgtcatagcttccggtattggtgagggtaaacacaactgcgtctgtctcaatgcgcagattggaatactcaaaggaggtgtaggacaatccgtatccaaagggatactgaacgcggacctttccggtatcatagtaacggtatcccacgtaaatgccctcccggtactccgcattgcgctcggtacttgggaaattcaggaacgcaggggtatcctcatagcgcagcggataggtttcattcaggcgtccggatggattgaccttgccggtgagcagatccagcatggcgccggcgcctgcctgaccgtacagatatccgtgcaggatggctttgcagcagtaatgccagggcatctccacagaggagcctgcgctgagcacacccacaatgttggaatttacctgggccatggcctccagcaggtcgatctgattctgtgggatccgcatatggctgcggtccagtccttctgattcgctgagctcatccagtccgaagcagtaaataacaatatccgccatgcctgccaggtccagagcggcttttttcagaactgcgtcctccctgccgtctctttggtagccacggtttacaccgatcacctgaagatcgtattcggggataatcttttccatggtatcgatctgtgttgcgttcaccatggaggatccggcgccctggtatctgggctccactgcaaagtcaccgatgagagctaccttgctctttggctgcagaggcagtatattatctgtgtttttcaaaagaacagcactttcctgtgctgcttttcttgcaagggcatggtgagcctttgtatcaaagcttgctggttttttctttgcattttcacttaaaaccaaaatggcgtcaagcaggtcgtccactgccaagtctaattcttccattttcagacttccgtcattcactgctttgcacagctgtcttgcagaatccaggccaggtgcgggcatttccaggttggagcctgtggccacaccctttacgtgatcgttggagccgccccagtctgtgatcacgataccgtcaaagccccattcctcccggaggatttcctgaagcagatgtttattttcattggcataaacaccgttcacttcattatagctggacataatggacttggcattgccctccttgacggcaatctcaaatccggtgagataaatctcacggagcgtgcgctcgtcaagcacggaattcattgacatacggcgcagctcctggctgtttaccgcaaaatgcttcggacatgcgtacacaccctggctttgaatgcctttcacataggcggcagccattttgcctgcatgataggggtcttctgaaaaatattcaaagttacgtccgcacagagggcttctcttaatgttcagtcccggtcccagaaggatgttcacatcctggacagccgcttcttcccccagtgcagtccccagctcttcccccagcttttcgtcccagctgttggcaatggttgctgctgtgggaaaacaggtggcgggcagcgatgcgttcagtcccagatgatctcctgcccctgcctgtctgcggatgccgtgagggccgtctgagcaggtaatggacggaatattcagacgttcataatctctggtctgccagacattctttccacttagaatggcggctttttcttccagagtcatcttggaaattaaatcctgatgtttcacctttacttcctcctttttattttcatagaatcagagtgtttcgattctcttgtctgctttttatcagtttccagcctttgtttataataatataaaatgattttatcaaaaccttaccgttcgtgcgctttttcgcataaactgttttttttttgcacaagttgaagacagaagcggtgattatctcaaaaacaaccaaaaaaagccgctcaaatttgtattctatgcacaaatttaagcggcaatgaaccctgggggggatgcatacaaagctgccaagcccctcatgagtgagaagatggggagttgaagcgggcttacctgctttgttccagcggtattaaaatctttaaatgaaaccattgttcttgtgtactgatatctacggcgcctccatattttgtcacggtatagcgcaggcttttcaggccgtatccgtggaattttgagtccttcttggtggtggcaggcagatcatctcccagatgtacttcttcctcataatagttttcaaaccggatgatgaggaaattcttctgggcatgggcagatacatggatcaggcgtttttccttgtcgggaattttcagttcacattcaatagcattgtccagggcgtttccgaaaatagagcagatatccatggttttcataaattcaaaaagcgttccgtctacaacgcaggtcatggttatgccatgcttttggcagtacagcttctttgtggtgagcattacatcaatgatctggttgccggttttattctgggactcgtagtcctgaagctccacctccatctggtcaagatactcgttgcgcttttccgcgttttcctctgcacgcagggcaatgatatggtgcttcaggtcatggtatttataattgatcacgtccatggcctcccgggcctgcttatactgtacatattgattatgtaaaatgctctgcacactttccagttcatagcgcacacgcagctccacacgctgtacgtggtaggcatacataatggctacgcctcccaggtccaccaaggtacgtacattgtagatttcttctgcatagcttcctccaaacagtgttcctgttgagacgaagcccaggttgctcataaagaacaccgcaagtccgatgatcgcataagatgtcagttcccggttggtgatgtttaaggcttctcttgttgtgccgtagcaatgatacagcctggcaaatcctgtatatacgatgccatagactgccaccaggatcagcagatgcacccacatctccaattcatatctccgggaaaagtagcagtcaacctgccattccaaagaggcggcaaattccgccagcacaaaagcccggatactatagtaggcggcatctctccactgcatttctgcacacagatagataaacacatacatcattccggcagccgtggccatacacagaatccacagcagattatccaggccgggggtgagagcgagaaaaacagactgtaccgttagcacacctacggcggtaagcacaaacttaccgcccgtaaaccggcgccgcacctccagcagacataccatacatgccagccattccgcaagagctgtatagatcctgggaatattaggcaaaacttccatttccgtcattttagttcaccccagtattttgtcagatcctgcataaacgcattgtggcgggggcggctcagctgcagccgttccccttttacctgagcgcatttgtcctggatgccctccacatgggcaagattgatgagataacttttatttccccttgaaaagccgaagccagccagctgttcctctgcagacttcatggtgccggcagagaggtagtctccgttgcctgtatgatagatcaggttgtggccctgactttctacataataaatgtctgaagtatccagccgaagaatcccccctttgaccggtatagtcacgaaattgctgctgcgccgtttgatccgtgcgatcgcccggcccagacgctcgcagaaggcaaagtaggatactggcttcagaatgtaatccagggcatcgaccttatagccgcggattgcatactgggtcatattggtaatgaaaatgatgatcaccttggagtctaccttacggatttcttccgccgcagtcattccatccacaaacttcatctggatatccatcagtataatgtcatactgaggtttgtactttgccgtaattccgtcaccatcccggtatacggttatgttgatctcttcacccgcagtcttctgatacttctgaagatactcggtcaactgtctgatataatcgtcctcgtcctctacgattgcaattctgatcataactttctccttttcctatttcccctgtgttttcacgattacgccgtcgtttccctgctgaccttttctacattatatttagttttccggcagtgtgcaagagattttacttctcgcgaaaggaagattgagagtgatttgagcataatagacaaaacaaaaattgacaaattgtacgttatgcacaacgtacataggcttttaggggacacaaatgacaatttatgcaaaaaaacaacagcttatgcaggaaatcaaccacccagtttgatttatgatatatttttatcactgtaagtaccaacacagtctggtactgaaaaagtatctatagtattttttaagtaaagccggaaagaagagaggttgctcagcttttcttttcggaaaagaaaaggaggagaacattttgaaacaaagaacaaaaattctcatgtctttgatgctgactctgagcctgacagcaggcggagtctccactactctggtagcggctgccaatgatccttacaaggctgcagaaggtgctgctgatccttacaaggccgcagaaggtgccgctgatccttacaaagctgctgagggcgctgctgatccttacaaggctgcagaaggtgccgctgatccttacaaagctgccgagggtgccgctgatccttacaaggctgcagaaggtgccgctgatccttacaaagctgccgagggtgctgctgatccttacaaagctgctgagggcgccgctgatccctataaagctgcagaaggtgccgctgatccttacaaggctgcagaaggcgctgccgatccttacaaagctgcagaaggtgccgctgatccttataagacagcagaagatgcttctaaagaggatgccgacaaagaagatacagacaaaaaagaagataacgattttacccccagtgaaggtgcaaaatataccactacagttacagaggacaactgggtaaaggttgaaaatgaagatggaaagacccttggtatttctccgacttccggtgtgaagctcattgaagaggatggctatgcattcaaggatttgaaccagaacggtgaactggatgcttatgaggactggagacggcccagcgaagagcgtgcagaagacctgacaaaccagatgaagggtgaagagatggctgctattttgacccatggcggctggggagatttcacaacagagcctctggctgaggatgatacttcctacacctatctgatgtccggcggacgcggcggtgtaacccgtaacatctcccagggaggcggcgctcatgcaaaatgggcaaatgccatccaggaggttgctgagagcagcttctacggtatcccggctatgatctccattgacccggcgaatatttccggtctgatcgagacactttctctgtcatccaccatgaatcctgagctggctgcagaggttggtaaagaaactgcaaaacagtatcgtgctgctggtgtaagcgccctgcttggaccgcaggttgatatttcttctccagttatgagccgtgcaggcggtacatacggcgaggatccacagctgacactggacattgctactgcatatgtgaatgcaatgcagtccagctatgatgaaaacggcgaagaccttggctggggcgatgagtccgtttactgctttacaaagcattttggcggcgcaggctctactgagggcggacgtgacgaccacggcaacggcggccgttatgcagtattccccggaagcaacctggaagctcacctgatcacttattttgacggtgtatttaatcttcctggaaagaccggttcctccggtatcatgacccagtatgccatcgacgtagacggcgaaggcaacccctatggtggtgagtgggcaggcgcttacaatccctacctgaacaatatgctggacgagtttggctatgacagcctgaagatcactgactggggtgtattccagtttgcaggagtctggggtgcagaaagcttagaagaagcagatcgtattgccactggctgggaaagaggagttaatcttctgggcggatacagcgatgtagagaaagctgttgaggcttacaacatcctggtagagcgcgatggccaggaaggtgctgacgagatcatgcacaaagctgcttacagatatatccacacaatgatgaacctgggaatgtttgatcagccttacagtgattccgcttatgctgattctatcgttaacagtgattctgcaaaagcttacggtctggaaactcagagacagtccgttgtcatgatcaagaatgacggcgttctcagtgcagacggcgctgcttccgaaaaaccaaccgtatatattccatatacttacaacacaggcttcagcgcatcttggatgggcggtatcaacgagggcactccgtcctggaatccaggaatggatctggagatcatgggccagtactttaatgttgtaactgataccttaggagatcctaccggtgaggcagatgctgacggcaatgctacttacaccaaggatgatcttacccgtgcatcagcagaagacatcgcagcctgcgattatgttctggttggtatgagcggtgcttatgttccttcctacaatgcccttatgacaggtgcatttggcggtgctccggtagaggaaggcgcagaggatgaatggtatcctgtatccctgcagtatggcgaatatgttgctgacactgcacgtgaggtttctatctccggtaaagttggtgaagacggaacaaaagagaaccgttcttacaagggcgttgcagctcatgaagttcccaactatggcgatctggaagcacttcagtatgcagcagaagcagcaggtgaagttccggtgatcgtatccatgaagatggaccgtggtatggtttggagtgaagttgagcctctggctgacgctatccttgtaaactacaacaagcagcgtgatgatgttgttgctgagatgatccttggcaaaaccgagcctagcggattgttagtattccagcagccgatcaatatggaagctgttgaagcacagacagacgatgttccccgtgacatggaatgctacacagatgcagccggcaatacctatgactttgctttcggtatgaactggtctggtgtcattgatgacgagcgtacagctaagtattctgctgagccgctgacaaagatgcagaactttgactatgctgcttatgcagaagccaacaaataatttatttatgctttttagcggcagggctggatgagctcagccctggtcaccgctttggtttatggcccggcacagagaagtctctgccgggccatttccatttttttacaaaagacaatttatgcaaaaacccaacaatttatgaaggtaatctgccacaaagatggatttatgatacaatttttaaaaataaccacgggagtgccatggaggcgcggcatcgtgaaaatttaaaggaggagaaaaatggttaatttattggaaaaacttcttggcccgattttttacggcatgggagttagtgaagcagacctgattgcttaccttacacagctccaaggctatgtgtacggcatcctggcagcgctggtcgtactgatcttagtactgatctttgcgtgcaaggcaaaaaaaggattcaagcatgtgatccgctgggaagcagtcatggcattcttggccgtaattttaattatggtgaattcaatctgctatggaccgatgtatacaaatgtttccggatttttgaatgcatccaaggctgagttctcagaagagacaattgcccacagcaaagaggtgatcgagaagattggagatgaaggtatcgttttggtgaaaaatgacggcctgcttcctctgtcttcagatgttgacagtctgaatgtattcggctgggattccacctgtcccatatttggcggcaccggttctgcaggttctcattctgcgggatctgtagatattttacagtcattaaaggacgcaggatatgcaaccaacgagaccctttctaaaatgtataccgactactacaatgttcgtcctgaaatctctatggcagctcaggactggtctcttccggagccaaatgtagctcactatacagatgagctgatgtctgaagcaaaagatttttctgatacagcagtgattgtgatcggccgtcccggcggtgagggtgcagaccttcccaaggatatgaatgcagtgatcaaaggcacctacaacgaaggtttggagacttccattgctcctgcaaactggcgttatatgaatgcaacctatgcaaacaatggcagctatgacgattttgaagaaggcgaatcttatctggagctttctgtaactgaggaacagatggtagataaggtgtgttctgagtttgacaatgttattgtgatcatcaatgcaaacaatgctatggagcttggctgggtagatgaatatgagcagatccgttccgttcttctggcaccaggcgcaggcgctgcaggcttttctgcactgggcaagattttcaacggtacggtgaacccctctggtaagactgtggatacctatgtaaaagatcttatggaaacaccgtatattaataatatcggaaatatgccttacaataacgtagatggcctgaaacagcaggcattggcagcagattccagttacaaaggaaatattgcgtttgtaaactatgtggaaggtatctatgtaggctataaattctacgagacagcagcagaagaaggcctgatcaagtatgaagatcatgtacagtatccctttggttatggtttgagctacactacctttgaaaagacaatggagaatttcaaagacaatggagataccgtttcctttgacgttgttgtaaaaaatacaggtgacgtggcaggtaaagaggcagtagagatttactacacaccgccttataccaacggtgggatcgagaaggcttctgtaaatcttgttgattttgagaaaacagatttgattgagcctggtgattcccagacagtttcctttgaaatttccaaggaagatatggcttcctatgattctgaaggtattaagatcaaagacggcggatacatcctggaagaaggagaatataccatctctgtgcgttctgattcccatacggtagatgcagaagagacctttaaggttgacgctgacattgagtatggtacagaggcaagatctacggatgaggttgtggctactaatcagtttgaagattacgccagaggagactttgtgcagctttcccgtgcagacaagttcaaaaattatgatgaggcctgcggtgagctgaaggaagaacagtttgttatgtctgacgagctgatggatgctgtggcggaaaatacctttggtatttatgatggaacaaaatacaacaatgattccgatgagaagccaacattgggtgcagacaatggtttgaccctctttgatctgaagggtgttgactacgatgatgagaaatgggacaagctgctggatcagctctcctttgaagacatggctaccatgatcaatgtaggcggatggcagacagcagagattgaatctgttggaaaggttgcaacctctgactgtgacggacctgctggtctgaataacttcgtgacacaggcatacggtacctcttatccttctgaagtactgctggcccagtgctggaacaagaagcttgcctacgaggttggacaggctatgggacaggaatttgcagatgtaaagaactttggatggtatggcccggccatgaatacacatcgctctgcatttgcaggacgtaactttgagtactattctgaggacggcgtacttgccggataccttgccatgaaccaggtaaatggtgctgctgagaagggtgtatatgcttatatcaaacactttgcagtgaatgaccaggagctgaaccgtgaagccttcctgctgacctttgcttctgagcaggccatccgtgaaatttatctgaagccgtttgagctttgtgtcaagggcttcgaaggtacagcacaggcttgtatgtcctcttacaattggcttggttctgttccaagctgcgcgaaccccaatctgctccagaacgttcttcgtgatgagtggggattccagggtatggtgatcactgactatgacggttcttatggatttatgatctctgataactgtatgagaaacggcaatgacctgatgcttggttatgcaaatgctgcatccaatcagtttacagatgagagtgcaagtgctctgctggctatgcgtcagtcttgtaagaacattatgtacaccattgcaaacagcggttattatgctggaagcgaaaatccagtgggcggtatgtccaatatggataagctcttcctgaaagttaatgtgatcggcggcatcgtgatcggcggtattgcactgttcgttctgatccgctacatcctgaaaagaaaaaaagctgcgaaggcttctgcccagtaagctttaagatcaattttaaatcatgagattcttccccccccccccgtgtgaggcagcttcggctgcctcacattttttgtgaataaataaagcagactatccttgtacttttttgtaattcatgctattattgtaggagttagaatataactaatttgtggttaagttgacttggaaataaagggatatgagaaaaagttttagaaattatccgggcggtgcacagagatacccggaaaaactaaggcgatggatgaacatacagcagaggcaagggctttcgtgagtttctggggcggcttaatagcaggaaagaggtgtagaatatggataacaagaaactgaccaacgaggtaggcgcaccagtagcggaaaatgaacattctctcacggcgggagcccgggggcctgtgatgcttcaggatgtgtggcttttggagaaactggcccattttgacagggaggttatccctgaacgacggatgcatgccaaaggctggggggcctatggatcacttacagtcacccacgatatttcccagtggaccaaagcaaaggttctacagccaggagcgaaaacggatcttttcattcgtttctccacagttgccggcgagcggggtgctgctgatgcggagagagatatccgcggggtagcggtaaagttttacacagaagaaggaaactgggatctggtaggaaataacactccaaccttctttttgagagatgtacataatttcccggatttgaaccgtgcagtgaagagagatccccgcacgggcatgcggtccgcccagaacaactgggatttctggacgcttcttcccgagaccttccatcagactacggtggttatgtcagacagaggaattccggcatccttccgccatatgcatttctacggagagcataccttctccttctacaatgagaaaaatgaacgagtatggtgcaagttccactttaagacccagcagggtattaaaaatctcacggatgatgaggccgcccagatcgtggcacaggacagggaaagccacggcagggatttatatgaggccatcgagcggggggactatccaaagtggacgatgtatgtgcagattatgacagaagagcaggcgctgaagcattacgagaatccctttgatataacaaaaatatggaagcatgcagaatatccccttcatgaagtgggtgtcctggagctgaaccggaatccggaaaattattttgcagaggtggagcaggcggcctttacacccgcccatgtggtacctggtattggattttccccggataaattccttcagggcagattgtttgtctatggggatgcacagcgctaccgcttaggcgtaaattataatcagatcccggtgaaccgggccaaggtagaggttcatgattatcaccgggacggctttatgcgtacagacggcaactatggcggggcgcctgcctattctcccaacagtctgggcgactgggctgctcagccggaggtgatggagccgccgctggacctttccggggccatgtatgcctatgatccccaggaggatcccacagatgactgcttccgggccggaggcgatctgtggagagtgatgacgcaggagcagaaagccctgctgatcgaaaatacagcaaggaatattgaatctgtcacagagaacattaagtaccgtcatgcagttcattgctattgggcagatcctgcatacggagaacgcatcacagaggccatgggactggatatggataaggtaaaagagctggccaaggggaatcataagagtcttatagaggccactcttccggcatagagtgcagccctatatccatagataatggtctgcaaagaaaaataagagcattatagtattatttaaggcccggctggagcgtattcagccgggccttatttaggaatcaggtctcattttgggaaacacggcagtgctttatggcctcattaagggcgtttgtaaaaaacactcttgcctgccgggcggatttagaccagggggccatgagatcaaaggcgtggtaacagcccttgaattccctgaattttaccgggatgcccacagcccggagcttcttcatatagtccaccgtctcgtcataaaagggctcgatggttcccacaaaggaaatggccgggggcagtgcgctgaaattctctgctctggcaggtgacgcatagcagggaacttcatcctttgggataccttccagatacatggcccaggctttttcgttttgctcttcactccacacaggggcgttgttatccttcatggagatggtttccatccgatcatccagcatgggatacagaggcatatgacaggcaatggagatctttcctttatccctggcatacaggcacagggcggcggtaagccctcccccggcgctctctccgcccacgaaaatctggtccttgtttatgccaagctcctgggcgttttccaccatccactccaaggtttggtaacagtcatttaatgcggccgggtagggcttttccacagacaggcagtaggcgggagctgccactacacattttccaaaagcctgctttgccatggatgcgtagatcatctccggcatgcctgttgcgtagccgcctccgtgaagccacagcaggccgggaacatttccagcttttttcccgggcttcttaaccagaacacggaaacgggagccgtcggggcgggtcaggaaatggctataggtgtttgcccgtgcttttctctttttttcaggggggtctggcattttgatcttcaagaccgggatcttttgtaagacaaggcggtaaatcattcccggaatccgtaattccttagcgatcatattattggtgactttcatttacagacattcctttctcacacaaattaaggcgcatatattaggcatttatgtgtgcgcgccctttaagtcttggagcagggcaaggttgacaaatttgggcacaatattagagcgccttttagatcctggagccggatgaagttggataaataaagtttatattccgaacagatctttggcgtccttcaggttcattgtccggctgcttttctttccggcgttgttcagcatctgctccagcttgctttcaatagatttcttgatcagcgattctccgtccacatccctgaggacaaaaaagagcatgggatctctgtccagtctggagccgatgccgtagagtactgcagccacatgcttgcacatataggcataatccggacaggagcagtggaaatggatttccttgggggagggaaacatcccatatttttgatcggaaaatatggctgccagctccttgggaaattttccatctgtgagctgctccagggattcaattctgtgattgcacagatggatgatctcctcccaattggctttatttaaggtgtcgatctctatggatacctggtagggcttggaggaacttccctggaccaatgcctgtacgctgcctttggaaattttcaagtccaggaccgcatggtttctcacatagcttttaccacggcccatgcggttggagtaatccgcatagctttccaggtttttgttccaggcttttccccaccaggtggaggcgatggtattcccttccaggatcacgggatcaatatctgggttcttctttttcagctttgcgatggccttgtctgcttttgcacgtttttctgccacggagacataggcagggtatccgtaatagctcattttacatcacccccaagactcaataattccatgatctgctggttgtccatttctgtgatccactgctctcctgaggagcttagaagatccgaggccagcttttccttctcctggatcatggtatctattttttcttcaatggttccctttgtgacaaatttgtggaccatcacgtttttggattgtccgatacggaaggcacggtctgtggcctgattctccacagcgggattccaccagcggtcaaaatggatcacatggttggctgcagttaagttcagtcccacacctccggctttcagggagagcaccatatagggaatatacgcttctccattaaaggcttccaccatgtgatttctgtttttaacagaggtgccgccgtgaagtacaaagcctttttggtggaaaattgtttccaggaaatcggacaaaggctcggtcatctcccggaattgggtgaataccaggacacgttctctcttttcataaatggtttcgcagatccgttccaattgttcaaatttaccactgttttcttttttataactgtccaaagccaggtactgatccggatgattgcagatctgtttaaatttcataatactggataagatcagtccttttcgctcaatcccctctgcggtgttgagcttctcctgaatttctttcaccagtttttggtacaggccaatctgttttttggtgagaccggcatattcccggatttcaatcttatccggcagatcggagatgattgaccggtctgttttgagacggcgcaggataaaggggctgactgttttccgcagtctggcataacctagctcatcctcctggattcccttggaaagctgggagaattcctttgcattgcctaaaaggccctggtttagaaaatcgaacagggaccacagatcgctgaggcggttttcaatgggggtaccggtcatggcgatgcggatgcctgcctttagggatttcacggttttgctctgtttggtgccggggtttttaatagcctgtgcctcgtccaggatgagaatatcccagtattggtcctggagagcctccagacgctgtaccataccataggtggtgatgaccagaaagcagtctgggtcgatcgccagctcctgattggattttacggcgcttttatgaaggacctggcaggtaagcaggggagtgaagcgttcaatttccttctgccagttgcctataagggaggcgggaagaaccaacagggcatgtccccctttgtgaatacgcatgtgttccagaaaggccagcatctgtacggttttaccaaggcccatatcatcggccaggcaggcgccaaagcccaggctggccatggtattcagccattggtagccgtccttttggtaggttctaagctgtgcctggaaggaatcctctacctttacatcctccagcagacggggattctttaatttctccttcaggccagccagccattggccattggatatggaaacatcgatctcctctcccaggtcccccagagcttctccaagggtgagctccatgcgcatggcatctgcaatggtcatgccgtttttggaggtgagctggctggcacgggcgaaggcatccagggcggcttccagcttcttcttattgatctcaacccatttgcccttgtattgcaccaatccctctgccatttggagaaattcccggagttctttctctgtaagaggttctccgtctatggacagaacaggggagaaatccataatggcgtccatacccacagcggaaggctttttgtcacctacggaaatactcagctttaaggcgttggtccgttttctccaccagtcagggactctgcacatgataccagcggcctcgtagatggggatttccttcagaaaggtgtaggcctcctgggtggtgagacgaagtggggaaaataattctccgctttccataagagaggagataaaagggctgttgtctgcagctctggccacagtggccaaaagtccaagcagctttttctggtcgttctgaaattccttcagggcgtttttcagcggggtgtggacagcctttttgctttttacaggctttgtggaataggtggccataaaggcaaagggatacgcctcctcctgactttctacaaggtggaagaagactcttccggccacatggatattggagttgtgctctgtaaaatacatggcggcgctgccttggtattctttcatttccctttgaaataccaggtaaaggtgctgccacagctcttccagccattcttttgtgacaaattctgttccgtggacaaaaggaacctcatccttgagcagggccagatcttcctggctcagaggggccaaggtgtcctgacgcataagttcaaggtccggctgctgggagagtctgcgtatgagaagttcggagattctgtgaagataggttatggaggaggacatccagtcctggcggaccagaaaccccatatggtagagggcggtatatttgtccttctgaagacgctgaaaccattccagctcttgcttttcctcttcttcacggacttttccttttttgaccacgggatccatattgacgataaaaccctggggttgaaaataggcagttaagtgtttggcattttctttcttcatttaaggtctccttagaggattggaaagattatttctttaactataacatcaagaggttgtatattcaaataaatttagcggggaccggtggttttctgcccgggtctttgggaaaagccttctgaatccctgggaattcttgacttttttggcaggacggcatatgatagacgagtaatataataagggaaattctgcccttttgtatgaagcctgagaatatgtagaaactaatccttatggaaaggatgagacgaaatgttggcaaaggaactaattttaatgaccgcgtgctgcctggctttgaccatgacgccggaaaaagcggcggatatggcggcggtggtcatggaggataccatgacggttcaggaggaatctccacaggagccccagcaggatgccaccataaaaagaccggataattatgtggagcctaccttctatgaccgactgatctttgtgggagattcccggactgtgggtatgcgggatgctttaggcgggcaggtgcagacctccacagtgtggtcctgtaaggttgccatgggctatgactggatgacaagcattggggttccccaggtggaagaatatattacagacaatacagcagtgatcattctcatgggggtcaatgaccctggaaatatttcaaactatgtaaattatgtaaacaataaagcccaggaatggagcgaccggggggctgacacctactatggggctgttggacctgtaaacggggcaaaatacgtgtcaaatgaacagattgaggcctttaatacctcccttcagtccagcctggcgggagtggagtatctggatgtgtatggacatatgctgtccgtgggatattccaccacagacggagtccattattcagcagatacctatcgggatatttatcagtatattgtagacaatctggactgcgacaacggaggaacaccgggctcgatctggggctaagagctattaacagcgctgcctgcccccaagtgatgggagagcggtgaattacaggaggagaaactatggcaggaaaaccattgctttccatgatcatttataattttaactgggaagagacaagaaaaacattggacagccttatggagcaggagggaatagagccggattctctggaaatacgcatgattaccagtgaacaggacaacagcccaaagctggcggcctgggcacaggagcatcaggtctccattctattcataagccccgggcctggctgtatacagaaggctgtccaggcctgtaccggcacctatctgtgtgtgtcccagtctggcgtttcctatcacaggaccatgctggaaaaattaaaggcctcccatgaagatctgggagagcagttttgtctcatggctgtttcctcaaaggacagtgacaaccatgcaaagcagaacaaccggtaccatagaaccactctgaaaaataaagccagtcttctggaggacagcaggctgtaccattattgcttctttgccttccttctgcccagggctgcccttagacaggaatgggcggactttggccatccactgttggaaatctgggcgtttctctataaacagatcacctatgcccagaggatctgctgtctggaaaagtgcgcctgctccctgtctcctgactgcacacatggggatttctggaagagcatccatgaggaggaagcgctggcaaaagtgtaccgtacagacttcttagagggactttggacctggaccataagaaacgatgaaatgaacaaggagaacggcgtgtacaacctgttccattatttcaccttatatgccatttaccgggggaagaaggaggaaaaggttgaagaggaggaaaacctgtgggcccaggaatatctggaacggctggactgcccccagctgatcgcctctgacagctttttgcccagggcctataaaaactatctgctgaagaaaaagggatatatctccgactgtcctcaggagattcaggagaagatggccaaggtactggatcaaagccagtttcccatgaagattcattatctgagcctggaaaagcacgccctgcgcatagaaggctctgccttgacctatgaacccggcgacagcgtgggctatttcacagggggcagaaatatgtatccctgtgttcagaaggattggggaaaatccagatactggttcggagaatgtgtggaaaaagaagtgtttttccagtgccggatttcctacagccagatcacagatgaagtgaagctgggcttcttttttaaaaaagatggaaaaaaggagcagcgtcccaacattaccttcggccgctttgcacccctgtcggatgagtgctttttatttgcagaggccaatgggtggttcctgtattttatagaggaggaaggggccattgtgcttgaaaaatcctcttttttccgaagaaaagagcttcagaagcttcaggacaattccctgaaacaggtgggaaacgatggggaggaggcagtggcgctccagggagaataccggaaatactgccgtctgcccaggaagaaaatatggctgatctccgacaggatttttgcagcagatgacaatggagaggccctgtggacctatctggcccaacatccagtgaaaggggtaaagccctattttgttcttcagaagagctccgaggactatgagcgcatccggaagctgggagaggtggtggagcctctgtccagggagcaccgcttcctgcatctggtaagtgactgcattctgtcttcccagatgaatgagccggtatttaatccttttggggaggagatggaatattataaaaatattcttgcacagaaaagaattgtattccttcagcatggaattacccagggagatattttccggtggatgaatcactatggcaggaatctgtgtggtatggtcaccaccacccgccaggagacagagacagtggtggaaaaaggcggctttaccaaggaccaggtgtggcctgtgggaatgtgccggtttgacctgctctaccatgatgagaaaaaagtggtcaccattatgcccacctggaggcagaagctgtgcacctccaggaactctgtgaccggccagtggattctgggtgaggggtttgagtccagtgagtattaccttttttacaatgggctcatcaatcaccccagacttttggagaaggccagggagtatggatatgagctgtggttccggcctcatcccttgttctacagtgcccttcccagattcaccgccaatcctcaggtgaaatttgtgccagaggatatggcctaccgggatatttttgccagaacagccttgatggtaacggattattcttctatagcttttgattttgcctatcttcataagcccctgatctattgtcagtttgaccgggatgactttttcggagggagccactcggtgaagaagggatattttgaccattatcgggacggcttcggggaggtgacccggaacctggaggatacggtagacaccatgatctcctatatggaaaatgactgtgccttaaagccggaatatgagaagcgtatagaggaaacctttccttttaaagacaattgctgcagggccagactggtgtccagactgctgaagacaccctagtactggtccataaagaccttgatttttgccagggattagcatatgataattaaaatgtaaaaaacaaccaaggctgatgaatctttaagaaacagagggagtacagtgagtaaaagggaagattataaacgatttatcgtattttgtctggccagcctggtaattctcgcacaggctgcggtgtttgcttttgtgtggtacgatttttaccgggcgctgatatttgagccattctggaggaagggcaactgggcgctgatcgccatgtatgctcttattgacgtactgttttccaggctgtatggaggattgaaggtagggtatctgaagaggatcgatgtgatttattcactgactttggccacaatctgtaccaatgtggtgatgtattttcagattactatgatcaatcggtggtttctggatccagtgccccttttggagatgactctggtggattttgttgtcattgtgttgtggacctttggctctcaatatatttattccaagctgtacggagcccgcagactgctggtgatctatggggacagaagccccgatgacctgatccagaagatgaattccaggcgtgataaatacgacatcagcggaaaggtccacataagtgtgggagaagaggagatctataaaatgatgcgccggtacgagggtgtgatcatctgggatctgccctcaggggtgcggaaccggttcttgaaatactgctttgcccactccatccgctgctatgtgacccccaagatctctgatgtgatccttacagggacggaccggatccatctgtttgatacgcctcttctcatgtccaggaacatgggactttctgcagagcagagacttgccaaaagaatttttgatatactgatcgcagggatcggcattgtgctcacctccccgattatgcttctgtgtgccattgccgtgaaggcctatgacagagggccggtgttctaccgccaggagcgtctcacctacaagggcaagccctttaaaatctttaaattccgcagcatgtgtgtggattcagagaagcatggagccagacttgcctccaagaatgattccaggatcacccctgtgggcaaggtgctgagaaaccttcactttgatgagcttccccagctttttaatgtatttttaggggatatgtccatggtggggccaaggcctgagcgcaaggagatcatgaaggaatatcaaagagagataccggaattttattaccgcctgaaggtaaaggcagggcttaccggctatgcccaggtctatggaaaatacaataccaccccctatgataagctgaagctggatctgttttatattgaaaattattccatgcttttggacattaagcttctgtttatgaccgtgaagattttctttcagaaggaggtttccgaaggggtggaggataaccaggtaaatgccctgaaggacattcctgacaagaaagagggtaaaaaatagttgacggaggcagtcatggatcatgtaaaatattctgtgctcatgtctgtgtacagaaaggaaaacccccaatattttaggacaagtgtggaaagcatgctggctcagaccgtaaagcccgcagactttgtccttgtgtgtgacgggcctctgcccagggagctggatcaggttattgagcaatacaaggaggcttatccccagctcttccaggtgatccgcctgaaggaaaatgtgggcctgggcctggcgctgcgggtgggcttaaagcactgccgcttcgatcaggttgcccgtatggattctgatgacattgcctttcccaaccggtgcgaaaggcagatcaaggccatggaaaagcaccatgcccagatggtcagcggaaccatcctggagtttgcgaaggatccgtcacagattctggcaaagaggacagtccccagaacagacggggaaattcgtgcaagggcgaaacgcaggaatccctttaaccacaactgtatgttctacagtaaaaaggccgtggaggaggcaggcagctaccgccactgtccctggtttgaggattattatctgtgggccagaatgctgcgcagaggcagcagaggctggaatattcaggagcctgttctctatgccagaaccggagaagctatgtaccagcgccggggagggctggcctatgtgaaggccatgctaaggtttaaatggaagcttaagaaaatgggattctatacctggaaggattttctcatatccgcaggaggccacaccctggtctgcctggtgcccaacaagctgcgcagtctgatctatgagaagctgctgcgcagatcctaaggaaatgggctggatgaagaagcaggaagcggcaaaaaagaagccggtataccgggcggcagaagaagcatggagctgccggcggacacaacggcatgaaggagtgcattgtatatggaaaaacttttgacagtggtgatacccacctacaaaattgagcagtatattgaagaatgtctggattcctttgctctggaggaggtgggggaagagctggaggttttggtggtcaacgacggctccccggaccgctctccacagcttgccagagcctatgaggagaagtatcctcatattttcaaggtggtggataaggagaacggaggccatggctcaaccatcaataaggggctggagctggccgcaggaaaatactttaaggtggtggacggagacgactgggtggacaaggacagttttctccatcttatggaggtgcttaagaccagcgcctgcgatattgtggcatccaactactgctgggtggattatctcacaggggagaagaaggcggagaagcctccttttaaggatgtggagtatgagagaacctattggttttcagagattgcagacaagacctttattaaaatgcactcccttacctaccgcacagagcttctgcgctcctgtgattttctcattgatgaacactgcttctatgtggacgcagagtatgcccttttccccattcccaaggtgcgtacagtatattttatccaggattgtgtgtacatgtaccgcatgggtatggaaggccagagcatgaatataaaaaacatgcagaagaatcggaagcagtatgtgcgggtgctcagaagaatgctggattattatagagataatcagagggccgggtgcccccaggccaatctggcctacatggaaaatgccattgcccttctatgtgtcagctattttaaaatccttctcagctacgctgcaagtaagcaggtactggagaaaatgaaagcctttgacaaggggctgaaaaaatgttatccacagatctataagaagatgcgtcatcctgcagtgcgtattctgcgtttcagcggttatcggctgtatccttgggcgcagaaggcttttgagctgaccaatgcccaccgcagcaaggggacggtcgcaagcagaggatgaaaaaacgcagggtaaggtgatgagatggcaattggcataaaacaaaaggtgaaaaaactggtggatgaccacccctggctgctgtcagtgatgacgtcagcctgggaacacctccgggggctgtattatggggcaggctattataaccgctggcccctggaggaaaaaacagtcctctttgaatccttcatagggcggaaatatgcggacagccccagagccatgtatgaggccatggcggcagatcctgcctatgattcttaccggaagatctggtgctttcaaaggccccaggactatagctttctggcccagaaccccaatacagagctggtggcttaccggagcagggactattacaaggctttggccagggcgaagtactgggtcacaaattatcatatccaggaaagcgtgaagaagcacccccgtcaggtgtatgtgcagacctggcacggcacgcctcttaaaaaaatcggctgcgatgtggaacatacaaccttggtggagcgggagcaaaaacatatgtatcgcatgtatgagaaggatggaagccgattccgttacgtggtatccccttctcctttttatacagaaaagtttacctctgccttccgcctggggccccaggccagggttttagaatacggttatcccagaaacgatgtgctgttcaccggaactcaggatcaggctcaggctcttaaaaaaaagctgggaatccctctggacaagaaggtgatcctatatgctcccacctggagggacaaccagagaacaaaaggggtaggctatacctatgacatggtcattgactatgagcagatgaaaaaagagctctctggggagtatgtgatgctcctgcgccttcactatctggttcaaagccagatccctgtggagaagggggaccggtttttctatgatgtgacagactatgatgaggtgggagagctttatcttatcacagacctgcttatgacagactactccagcgtgttttttgactttgcaaatctgaggcggcccatggtattctatatgtatgattatgaggagtataaaaatcatctccgggatttttattttgatctacaggagcttccaggaaccgtgatcaaagagccggtaaccgatctgccccggcggatacgccaggcagaagaagggttttgctatgatgagaaatacagagtgtttaatgaaaaattcaatccccaccagggcccctgtgcagccaaggtgaaccgggcagttttcaggggaaggtccgggaagggaagcagagcacaaggaaagcaataggagaggaagatcaatggattggaagaaggtctggtcccagcttcgcagtctgggaaaaaatacttggtatgtccactgctataagcacacccccgtggatccccataagattctcctggaatccagggtgggctattccagaggtgatattgacggaaatattctgcggctcactcaggcgttgagcacagacacataccgggactatcagctatatgtatcctatagtaagggtaagaaaaaatcggtacaggccaagctggataagctgggcatccggggggtgcagctggtggcctcggagagctatgcttattataagctcctatgcagtgccaaatacttatttaatgacgtgaccttcccaagccggtttatgaaaaaaaacagccaggtatatgccaacacttggcatggtacggcactgaaatgtctggggaagaacgtgccccatggggcctggtccataggcaatacccagagaaatttctttatggcagattatattatccagcccagcgtttacggggctcagcgtctccgggaggcctataacctggggcatatttaccaggggacctacctgtatgcaggcctgccccggaacagcattttttataaggaggaccggcgtggcccccttcggtctgagcttggcctggagggaaagcgggtctatgcctacatgcccacctggagaggcgtggctgacaaccaggaggcagagattgaaaagcttatgcaggttcaccaggtccaggaatattttaggaaaatagatcaattgctggaagaggatgagattttctatgcaaggttccatccctttgtgggagatgcgctggacttgagcccctatacccacataaagcccttcccggcagagtatgatccctatgagatcctgaatatctgtgattgtctggtgacggattattccagtgtattttttgactatgccaatgtaaagaacgggaagatcgtcctgttctgttatgacagagaagcctatgccaaggagcgttccttttatctgtctttggaggagctcccctttccccaggtggttactgtggaggagctggtccaagagctgcgttcccctgtaaattatgaccgagaggcgttctgcagggagttctgcacctatgacggaccccaggcagcagagatcatctgccaggagattctccttggggaacaaaggtgccccagagccagtgagaaggactatggtgacgggaagcaaaatctgctgttctatatgggaagactgcagaaaaatggcatgatgacagcttatcacaatctgctttcctgccttggcccggaccgttatcattattttaccgcttttgacgaggagccagtggggaaggatccccggagtcttcgtctgctcccctcctgtacccaggcagcgcccatcacggctggcatggggcggacctacacagagctggctgcctgtattctccgttaccggggcaagcgggactggaaatgggtaaaccggattctggatcggatgtataagagggcgtatgagaggaattacgcatatgccaggctggacatggtgatccagtatacagggtatggcagcgatgccctgagtatgttccggtttgccccctgccgcaaggtggtctttgtccataacgacatggagatggagctgaagacaaagggcatggaaaaccgctgggctcttcgggatgcctacagaagctatgatcacgtggcagtggtctcccgggatattcttccctctgttcaaagcatcagcgcaaggaaggacaatatccgggtggtggacaactgccatgactggaggggcgtgctggccaaggcagagcagcctttgaaatacaacaactggaccaaaagcaccatgcccctggaacggctgagagctttactggactctgataaaaagaaatttattaccatcgggcggtattctccggagaaaaatcatctagcccttatgaaggcctttggaaaatatcacagggaaaatccggaaagctgtctaattatcatcggcagcgaaggccctctgtttattcagaccataaaatgggcgaagaagctgggaatatccaaatgtacggcagtgatatgtgccctggacaatcccatgccagtgctgaagaaatgtgatctgtttcttttaccctctctctatgaggggctgggccttgtgcttttggaggcagacaccctggggattcctgtcatctccgcagatgtggtggggccgagaggatttatgagggctcatggaggctgcctgataaagccggatgtccagagcatctatgagggtatgaaagcctttgaggctgggaaggtgcctgtgctgaaggtagactatgagaaatggaataaaaaatgtatagaagaattcctggaattggttccgggaaaataaaaggaagaagctttcttaggtgaatgaagacacaaaagaaagcataagaggtaattttattgaagccaaaaaccatgcggaccttattacaaggcctttcatacggaagcattgaggtggtatctgccagaaaactggctgacctgaaacggctggaccctatgaaaattttttacagaaaattagatgcccaggtttataatgaagagtatgaaatccccatacgcctgtactttccatctgaggaggctatgaaaaaaggcgtggaggagggccatgccctgcccgtgctgcttttcttccatgggggaggctgggttacagagagcgtcgagaattatgaccgggtatgtgcccggatgtcccaggctacaggacagatcgtggcctcagtggaataccgtctggctccggaataccgcttccctacagcacttttggactgctacggggctgctaaggctttgtatacccagcggtttttgctgaacacagatccggatcagatcactatcatgggtgacagcgcaggagggaacctggcggcggcggtatgccttatggccagagataagaaggaatttttccccaagagacagattcttatttaccctgccctgtacaactgctatacccaggataccccctacgaatccgtaagggagaatggggaggggtatcttctcaccgcaggcaagatggagagttatctctccttgtatcagagcagtctaaaggacagggagaatccttattttgccccccttcttgctgaggatttccataatctgccagatacactgatcctcactgcccagtatgatcccctccgggatgaaggggaggactatggggaaaagctgcggcttgcaggaaatcgcgtgcagattcacaggatcgcaggtgcttttcacggattttttgcccttggaattaagtttttccatgtgcaggaaagttttgaatatatgaaccagtttttaaaggaggcttgataacatgccaaattccaggcgttcgaggtggagaaaattggataatgcggccctggcttttcccgcggttacagggaaaaaggatacccgcgtgttccggttctactgtattctcaaggaggaggtgaacccggaatttcttcagacagcattggaacagaccttggaaaaatatcctctctaccaggcagtgctccgcaagggactgttttggttttatttggagcggcgggatctgaaggcccaggcaaaacaggaggaccggccgccctgcagcagattgtatataccagatgaaaaaagtctgctttttgaggtgtcttatcacaaagagagaatcaactttgaggtctttcatgccctcacagacggcactggggccatgcggttcttaaaggagctggtaaagaattatctccagacagcccatccagatgcgggactgccgcctctggaggaggaagacgaggtcacggtaagtgaccaggaggaggatagcttttcccagtattattccgctgatacccccaggctgaaggaagataagaaggctgcctggcagcttaagaagctgtctctggaccagatcgatatgaagatcgtggagctggtactgtctgtgaaggaggttttggcaaaggccagggagatgggagtatccatcaccgtactgctggccgctatgcttttgtgggccatccatgaggaggtgcccagcagccagcgcaggaagccggtgagcctgatggttccagtgaacctgcggaactatttcccctctcagtccatgaccaatttcttcggctggatcgaggtgggatatgagtttcaggaggataccgtctttgaggacgtggtggctcaagtaaagaattgctttgccaaggagctggtgaaggagcgcattggcatgcgtatggcccagcttgtccgtctggagaaaaatccggtgttaagggccgtgcctctggagatcaaacagcttgtccttcaggcagggactaattttggaggaaaaagcatcacggcagtgtattccaatgtgggtgtgatccgcatgcccaaggaatacgaaacctatattcaccgttttggtttgtatgccagctcaaacagtctgcagctttgcagctgctcctatggagatgatctggttctgggatttacctctaagatcgccaatgaaaatattgagagaaatttcatgaagaagctgggagagtacggaatcgcttacgaagaagtaaaaaatgattttcccggctgcaatgaagaaaagtccaaggaggacagcaaaatccttcaggcctttaccttcctgtgcattgccatcgcagttgtgtgctgtattgtggactttttcatggagagcaaggttgggtggtccttgtttgtggccgccggctgtctgtgtacctggctggttgtggccatggcctaccaaaagaggaaaaatcctctgaaaaatgaaatgtggcagcttttgatcatctcagccatttgtattttctgggataggtttactgggtggcgtggatggtccgtagattttgtgcttcccatcggctgcctggccgtgctgttttccatggtggtcattgcccgggtacagcatctggaggcggcagagtacttattttatatcatccaggcctgcgccgtggggtggatcccgctgatccttctcttggcaggagtggtgaagattcctcatctggctgtggcctgctccggaatctgcttcctgttcctggcagggctgtttttgttccgaaaggcagaggtgattcaggagcttcacaagaagtttcacatgtgatggcatgaccgagactgtatttcaggcaggagtgaaaaaaacacttccggcagtatgccaggaagtccaggaatcgaagaaaactcagggccggctctgggagatatggggcagcagtttgaataaaactgctgtcctatttttgtggctttttacgcagccgggtgcataggcgtacccagggatcaggaaggacggcctttcacaagaacagctccttggtgctgccgggcatccagtgagcagtaactgcctggtaaaaaatagaagaattttttataaaaaaccgcagaaaacataaaattcttgtgctataatagtaacataattttacagaatcgaagaaatagttggaattatagtagaaaaatcaaaaaaatagacaaaaatggaccgggggaatggaggaggagtatgttcacggcgattattgcagatgatgagaggaatatctgcattcttctcaaaaagcttgttaattgggaggaattaggaatctcccttattggagaatattataatggacaggatttgttggaggccattattcaggatgatccggatattgtagttacagacattctcatgccgggcatgaatggactggatattgtaaaaacctgtatcaccagcggctgcaaggctgtttttcttctcataagcggccatgcccagtttgaatatgcacatatggccatacagtatggggtggagaactatctgctcaaacccattaatcagcaggagctggaaagaaatctaaaacagatctgtacccgcctcaatgaaattaagctcacccagcacaacaatctagtgctggaacagaagcttcaggtgagtatggaaattatcagccagcagtttctgaacaatctgttgttttccccggactttatttatgaaagggacctctctttgatcaatgagaaatatcatctccagttccaggagggctggttccggcttctggccattaagcctgactgcaagatgaaatacaatacggatcagtataagctggttctgcggcagatcctgaagtttgtcctgtccagtatgggggaggcctactgccaggtgctgggacttcacacctcttatgaagtgctcattcttattaactatcaggatgaaaaggaggctgcagtgaatattaagacggtcctggatgcagcccagaaccggttctatcactattgcgacctgaccatagggatctccactaaggtggacagccttttccaggtatccagggaggaagccctgtatgccatattatccagaacagtggtgggaaacggcaaattaatcgattacagcggcctgtcctattttacacgccggctgccagagacaactctgctggaaaaatacaaaagctatctggaggttttaaataagcaaagtctggatgagctttttcagactctgaacagtcagtgccagatgcccgatacggatccgggaagcctgtattcccttctggagaaaatgggaaaggagctggagctggcagtgaagaaggagtgccctggatggaaggaccgggagctggactatgtggcagtgataaaaaacggcaaaaccctgaaggccatggtggacggcttccaggatctggtgaacagatatatcagagagcgcaggaactctgaatctgcaaaggagatcaaacatattagtgccgcaaaaaaatatgtcatggaccatctggcagataacattaccttaaatgacattgcagaggtggtttacatgaatcctacctatttcagcgcattgtttaaaaaggagacgggacaaaatttcagcgactatctggtagatcagcgcattgccagagccaaggagctgctcaaggatctgagcctgtccgtggccgaggtgggcatgcaggtgggatatcagaattccaggtatttcagcaaagtattcctaaaaagtgtagggatcaagccttctgaatacagacgtctctatacctgatgcgaggaggagggcaggatgaaaaaatacaaggaatccatgatttctcttggactgattgttttgtgtgcaggtataaccgccgctgcctatggaagaggcggctgctccagggcctgctttctgattttggaggctgcacttataatcttggggatctatgtgacggtggggctgatcctgccttattggcgcctgcagaattatttcatcaggaaaagccaggaggcgcctgcaaagaggggagaggaagaaaaccaggagagggcctccatgcttcaggatattcagctctctttgctcacagagcagatcaatccgcatttcctgtacaatacgctggagtccatccgggggcaggcattatttaatgatgactatattgtggcagatatggcagagactttggctacctttttccggtacagcatttccaggaagggcaatgtggtcaccttaaatgatgaaattaaaaatgtgcagacctatttaaagattcaacaattccggtttcagaataatttcgactttgagattcatatggaggatgagcagacgggagaattccaaatgcccaagctcacccttcagcctattgtggaaaatgctctggtccacggcatagatacttcccgggcaggagggcatattgtgctcagagctattgagacgcaggacaagctggttctggatgtgaaggataacggcagggggatcaatccggacaagctggaggaaatgaatgacaacctggcaaagccctattataaggtatctacaggggggcaggaggcaaaagggggcattgccctttacaatatcaacaaccgcatgaagctgatgtatggggaaatttatggtctgcgtctgttttctacagagggagtagggacggaggtacagatcacacttcccaagatcagagaggagaagatggggggactgatggaatgaagaaagagctgctttgtgcccgcaggctgtctattttagtgcagaaggagtacgcataccggaacctggattttacagtttatgaaaatgagctgctgggtgtgtgccagctttcttatttgaagaagacctcctggatcaagcagttatttggaccagatacgaaaatctttggggaggtgtggctggacggacggcctgtggaccttcataaaaagaagataagtccggatatatactatatcacagaagtgtctatgcttatagattctctgtccattgcagacaatctttttgcagtgcaggagttcgggcggtttaagctcaggtataatgagagggcagcccagagggcggccagagactttttaagggagctgcagcttccgttggatctgaacactcccatttcttccctgtccaaatccatggtccaccttcttcagatcgccaaggccattctccttaatgccaagatcattgttctggacaatatcaccgatgactacagcgttaaggaatatgaccgcctgctggacctgatcagccgctataagaaggatgggagagcctttgtgtttttctccaaccgggaaaacaggcttacccggcaggcggaccggatttatattcttcggaaccaccggctggcagggcagatttttcatgaggaatataccagcagtctattttttcatatgcttcatgggggaaagggaaagccggtcttttacagagcgtctacggtgagagaggagcttgtttttcagacggattttgccgggattttgaaaaatcccctggattttgctgttcacaggggagagattgtagggatcctggatctctatggaagctataccagtgcctttttaaactattttctctcctgctttccctatgacattgagggaaaaaggtgcaggaattaccaggaggcagtaaaacacgggcttgcggcggtctccctgtcggaaagtgaggccccgattttcccggattttaccctcaatgaaaatcttacctttcagattctgccaaggatcagcagaggacttgttattaacaagagactgcagaaatattgtgggcagaggtatctgaaggagatcatcaccagaaaagaggagggggaggttctggccttctccagaatccggctgctcatgtataagtggatattaagcaggcctaagctgatggttctggacagtctaaccacgggtatggatcatggggacaagaagagatttcgttttatggtggaccaggcggcagcagagggaactgcctgtgtgcttcttacctcttacccggaggactgtctgaatatctgtgataagatctggatcattcaagaagattcctcctccaggctttttgacagaagatctacattggagaaaaaagaaagcatggaggatttcagtgagtatctgaaatcctccatgccagaacatctgcgatcataattgatcagggcattggccggaacatttcttccagctcgggaatccgttctgggggaagggggcggcaggtgcccattttttctgccaaatatacaatgtggcaatagttttccagccattccatacggaaaaaggccgcttccagggagggcccccaggtgatggctccgtggttggccataagcgcacagttataatccagacagtagggcttcacagaatctggaacctcataggtgcggggcatggcaaagggggccactggaatcacctcccccagttcaatggcctcacacagataatcggtgcgaagctttgtgcaggtcagagaataagcggtggaaaaaatgggatgggcatggacaacaccctggacgttagggtttgtcttataaattcccaggtgcactttgatttctgaggtgggctgatattctgttttgttctgcacatttccctccagatccataagcagcatcatgtccggggtcattcggcccttgctgaccatggtgggggttgcccatactcggtcctctgacaccttgcaggtgatatttcctgcattggcaaccaccagaccggtttcatacattctgcgtccatattcgcagatcatttcctttgcttcataatctgaaagatatttctccatacaaacttcctccttgtgatcctggtataagctgcatttccaggccgaaaaattatcctatgtggaacattaaggcattttctgcagcttataccagcgtaaaaaatagtattgtctctgtttctcattatgaaggaatcagaaaaaaagaaaatgtaagaggtttttgaaatatggtcatatctttgcatgttggcccggaattcttgaaaagagaaaatctcccccttatgatgagaaaaaaagcgaggtgaacagtatgaaaaattatttgctgggtgtggatcttggaaccacgaatgtgaaggccatgttatttacacaggggggtgagccggtggcaaagggtgaggccggacattataagatccactcccctcatttcaactgggcggagcaggatgcctccctatggtggtcagatacggtggaggctatacgccagattgcggagaaaaacccatggaaggacggccgtctggcgggaatctccatcagctcccagggtatggccatgctgcctctggatgagaaaggaaatcctctcactctggcccatatctggatggaccggcggggagttgaggaggcaaggattttggaggaggtctttggccgggagagaatcaaggagtgctttggggcctacgcggacccttattatcaaatcacaaatatcctgtggtttaagcgcaatcagcctgagctttataaacgcacccggtatattgtaaaggcaaacacttatctaaactataagcttacaggggaactggccctggatgaaggacaggcggagatgaccctttgctatgacattcataagcggcaatggtcccgggagctgggagaaaaaatagggattcctctccaggagattcttcccagggtggccaaggcccatgaaatcctggggacagtcacacaagaagcctcccaggagaccggacttcccaaaggaactccggtgatggtgggcggtgtggactctgctctggctctgctggaggtgggaattaccagacagggggacggagccgagatcacaggtacctccagtaataatttctttgccagtcccacgcttcccccggcagactcagcccttctatcttttactcccctggtgcgaaccaggcaggtgccccatcttctttttggacccaccaacaccacaggagaggccttgcggtggtttggggagattttaggagtgaaaggaactgggggaaggaatgtgtatgaggagctggagcggatggtagcacaggccggggcaggaagcagcggtatcttgttttatccctatcttttgggggaacgggcccctctttggagcaataccatgagggggatgttcattggagccagcatccgcagctgccgagaggattttgtgcggtcggtatatgaaggaacctcctttgcattaaaggacatctgccaggaggcagagagaacaggaattcagataaaacggttccgtgttgcaggaggatgcgccaaaagtgatctatggttgaaaattaaggcatctgtcctaaatctgcctatctatgcttccataaattcaggaggagctcccagaggaaatgccattttagccggatacggaacaggcctttatgaagactttgagaaaacggcagaggaaatgatacactttgacaaaattgtggaaccagatccccagtgggccagagtgtatgaggaattatttccggtttaccaatccctccgccagtccgtcagggaagacttggaccatttggcccaggtggcgggaaagtatgagtgagcagggaaagggaaagaaaatcaaaatattgtagcacaaatctttagattgtaacattgtgggaacaggggggcacgcctataattaaattatgatttaaccgcatcaaggaaacagcgaagcggattccggccgggatcagcacatgaatcaaacaaggagaaggatagaagatatcacaaaaaaactaccagaaaggggtaaagacatgaagagaaaagtattagcagcaatcttaagcgcaggtatggcagttggaatgggtatgggaggcttggttccggttcaggaagtaaaagcagaggagtccaaggaagacaccacccaggaggaaaataaggaagcggcaggggaagagaaaaccatagatgccagcggaattaaaattgggattttgctaaaccaggcttccacacaggttatcagcagcatgggaaatgccatggtggcaaaagcagaggaattgggagcagagcccacgttaatgtactatgacatggatgttcccacctttatcagtgacgtggaaaactttatcagctcagactatgatgtgatcattgcccatcccatgaatgcagatgacggggcagatgcgctgaaggaggcttatagcaagggaatcaatatcattacctttgataccatcatcaacggagattacaatcatgcctttgtagcctccaactacgatgtgggatacaagatcggcgaatctgcagcgaaatgggcacaggaaaatctggtggccaaggatattgatccggttatcggacttgtgaactatccctcctctgaattcttatctgcaagagaagagggcatccgggctgccattgaggagcttcttccggaaggtgagatcgtgatcactggagctggaaccacggagctggaaggactggaggcaggagagaatttccttcaggcatacccagagatgaacgtggtggtttccattaatgatgatactatgcacggggtttaccaggcattttcaggagccggttatgcagatgcacaggacagaggacttttctcctgtgacggcacagagcagtcaaaagaacttgtaaaagcaggcggcgtgttcaaatgtgtggttgacctggaactggacagcgtaggcgagagtatggtggaatgtggctgtcttgatattttaggacagaatgacaaatacgaggaagtgaattacttccccatgaacccgctgaccattgataacattgatgagttctggactccttcacaggataaggaagcaaaataagagacagcagggcagaggcatataggaggggcgcaggcatctacggatcaggccggtttttggtgcctgcgccttatgtgaaaggaagaaaaggggaggtggacgcatgtctgcgaaccaggaagaaatttcgctggaagtaaaaaatatagtaaaaacatatccgggagtggtggccctgaaccaggtctccattgcgttccgcaagggagaagtgcacgccctcatcggagagaacggcgcgggaaaatccacactgatgaacgtaatatccggagttaccgctcctgacagcggcacctttatcattcagggggagagttttgccaagattacgccaaaccaggcaagaaaagaaggcgtgcgggtaatttaccaggaactgaatctggtgcctaccttatccgtgacagagaacatatttatgggagcctttgagggaaaccatattaccgttgatatgaaaagaatgcgcaaaagggtagaagagctctttgcctatattggaattaaaaatattgatccagatgaaatggtggaaaatctcaccgttgcccagatgcagcttgtggagatcaccaaggctgtgagcagtgaagtaaaaattttggttatggatgagccgacagcgcctctcacgacccatgaggtagagattctattccggctgatccataagttaaaagaaaaaggtgtgacaattatctatatttctcatcgtctcaacgagatttatgaggttacagaccgtctgactgtactgagggacggaatgaaggtgatcacaaaagacaccaaagacacgacgagggaggaattgatcaaatatatggtggggagagagctgaaggagacctatccccccagaacccagcagccgggagataaaatcctggaggtaaagtctttgtacggaaacggattaagagatattaatttctatgtgagaaagggagaaatcctgggagtggcaggtctggtgggagccgggcgcacagagcttatgcgcctgatctttggcgcagaccccaagcagcgaggagaggtcatattggaaggaaagaagcaggacatccattcaccgggagaggctgttgataaagggatcgccctggtgcctgaagaccggaagcttcagggtgttctgctggaactttccatcaaggagaacctaatacttcccactgtgcgccagatatccaaacgtcttgtcatagaccggaaaaaggaaaaagaaaccatagagaaacagatgaagggactgaagatcaaagccccctccgtgaaccagcttgtgcgcaatctaagcggaggcaaccagcagaaggtggtggtgggaaagtggttggccggaaactccaggcttcttattttcgatgagcctacaagaggaattgatgtgggagccaagcaggagatctatcatctaatgaatgaaatgacggaacagggaatcagtattattatggtttcctctgaaatggaagagctgctgggcatgtccgacaggattctggttctgcgtgagggcaggatcgcaggaaccctggaccggaaagaggatttcaaccaggaaaacattatgcgcctggcagcaattaactaacatgagaagcggggtggcaaaattatgaaaaaattcttatcactgctgaaaaaatatacagtggttcttctgctgttgattcttgtggtgtacttttcagttaccacaaggaattttgcgtcaacaggcaacttgatcaatatgcttcgccaggtggcgatccttggaatcctgtccataggaagtgccatggtcatcatatccggaaatctggatctatccattggctccattatctctttggtgagctgcagcacagccatgatgatcctggcgggagttcccattgtgctggcctttcttctgggcatctgcatcgccatcgggctgtctgtatttaacggtctggtgatcgtggcgacgggcatgccggccatgatctgtaccctggccatgcagcaggtgcttcagggggttacctatattctcacaggagcgtcccccaaatatggcatgccggaccagattaaaatcctaggccagggttacattggagtgatccctgtaccggttgtgatcatgatcattgtatttattatgggagcatttatcctgaacagaacttatattggaagatatttctatgcagtgggaagcaatccggaggcagccagactttccggcctgtctgtgaagaagatccatcttctggcctacttgatcaatggtatctttgccggcattgcaggaattgttatgatgtcccgtatggcatccggccagccggaggcgggcaaggggtatgagatggatgtgatcacggcctgcgttgtgggcggcgtggcctttgccggaggcaagggaaaggtttccggggtcattcagggtgttctggttatgggagttctctccaacggccttggggtaaagggtgtggattcttatacccagcttttgttcaagggtgttgtgctgatcctggtggtaggtatggacagtatccagcaggcaagggcgaagaacagtaaaatgaaaatagagatgacacaggaaccggctgcataaggaggaaggaacgatgaaagtattggttgcacaccgcagaccggagcttgcccggaaattccgggagttctgtgaaagcacaaataaggaatgctttaagggtctggagatcgaggatgtaagagataccaatgccaaacggtatgggaattttgaggcatatgtacagaagatggaaaaggagggcccggattggacagacccggaccaggaggtgttagacaagatcgcagatgcggatattttactcattgagtgggcggctgtgtccaggaaggtcatagaggcaggaaaaaatctaaagatcatcgccaccatccgaagcggtgcagataatatccaagtggaggcggccagggagcgggggatttctgtatccatctccccctccaggctggcagagccagtggcagatatgaccattgccctcatcttgtcagaggtccggggaattctgcgccggaatctgatcagcaatcagggacagtgggtggaggaaaaatatgatgacagtacccacagtgccctgtgcaatctcacctttggcctggttggttatgggggcatagccaggactgtggccaggcggctgatccatggctttggagccagggtcctggcctatgagcccattacccccagagaggttttgataaaggatgcggtggagccagtgtccctggaggagctgtgcacaagggcggatgtggtgtccatgcacgccaggctttgcccagagacaaggggaatgtttggaaaagaacagttttccatgatgaaacccaatgccttgtttattaacacagcaagagcgggtctggtggatgaaggggcgctgattcaggcgttgaagagcggacagatcagaggagcgggcctggatgtgtatgaaaaggagcctcttccattggattctcccctgcttcaaatggacaatgtgaccttgatgccccattccgcagggatcaccagcgatattgtggtaaacagtctgaagatcatcacccaggagctggagcggttccttaccggacagcctctgaagttcacggtgtagaaggaggggcctatgaagaagataatcaatgatccggacagcgtggtaagggaaatgtgccagggccttgcctatgcagacacaaagctgaaatggatccccaaatataacattctgcgaaaaaaagagattaacaaaaataaagtatctctcatcagcggagggggaagcggccatgagcctgcccatgcaggttatattggaaaaggaatgttggacgccgccgtgtgcggagaagaatttgcctccccttctcagattcaggtttaccaggccatccgggagtgcgcaagccccaaaggcatcctgctcattgtgaaaaattacagcggggacattatgaactttaaaaatgccatgtatctggccagagacgatgggctgaaggtggatttcgtgaaggtggatgatgacatcgcagtccaggacagtctctatacagtgggaagacgaggggttgcgggaaccgtcctggtacataagatcgtaggtgcggcagcccagacagggatggagctggaggagctgaagaagctggcccacaaaaccattgaccgggtgcgcagcatgggttttgctcttacctcctgtacagttccggccaagggaaatcccacctttgagctgggcggagaggagatggaatatggcgtgggtatccacggagaaccaggcatccaaagggaaaagatcctgccagccagagagctggcccagaggatgacaaaggccctgctggcggatctgcagccaaagaaggaggagctctgtgttctcatcaatggttttggcggcacgcctcttcaggagctgtatcttctcaatgcctgtgtcattcaggagctgcacagccagggaataaaggtataccgcacctttgcaggcaattatatgaccagcattgatatggaaggagcctctgtgtccttcctgacactggacaaggagctgaaaatattcctggatgccatcagcgaggcgcccgcatttcgggtatccggccccgtgccgcctatagtctttgaagaacgcccccagaggtccatgacccaggaaaatttcggtatgcttacagattcccggtgggcgaacgtgggagaacaggagcttaccctggaaaatcttgcgtggctcattgataaaatgggagagatcatcatccgccaggaggttcccttctgtgagctggacgcccatgcgggggacggagatttcggcatgagtatagccaagggcttccggcagctgaagcgggagtggcaggacctgatggaggagcatttccacaacatgggagagtttcttcaggcctgtgccatgatcattatggaaaactgcggaggagcctcaggccccatctggggagcggcatttcgtatggcaggaaaggcggcaggaaacgtgcgtgccttaaatgtgaaagagtttgcccagatcctccagggggctgtggaaggcatccaggtgacaggggagcgctcctttggaaggggagccgtggtgggggataaaaccctgatcgatgcactggttccctgcgctcaggcatgggaggcggctgctgaaggacagatgagctttagacaggcgtttcaaaatggagcccaggcggctgttctgggggccaagagcacggaagctatcactgcccggatgggacgggcaggaaccgtaggtgagcgcagcatcggttacccggatgcaggggcctacgccctgggagtcatatttactgagttggcggagagtatggtgttttaatcccattaaggaagcgaagtgtctattccattgaattaccggagaggtgtccaaaaaacacctctcctttttgtgaaataataccaaagatacctttggattctcttttttattaaatcaatcttgacaatagcacatttatgtaatatcattatgtcatgacaaaggtatataaagacataaacgagaaggaatggtgattatgtgtaattacaacaaggctacacaacctacaatttatttcatcggcgtgacgacaggttcctcttccattatgaaggtattccccaaatgggcccaggctctggagctgaaggatgcagtgatcaaagggattgatttcaaaccccactctgacccggaagcctacagagaagcagtccgctttattaaggaagatcctctgtctttgggagcgctggtgaccacccacaagatcgacctgtacaacagctgcaaggacctgtttgattacatagatccttttgcccggcagctgggggagatctcctgtatttccaagaaggacggagagttccgtgctcatgcaaaggatcctatttccagcggacttgccctggaagcctttgttccaaaggactactggaagaactatgggggtgaagtgctcttgctgggagcaggaggagcatctctggcaatgtcggtgtattttacccaggagaaattcggggacaatgtgcccaagaagattaccattgccaaccgaagccttccaaggctccaggaagcaaagcgtattttagacggcttgaacgagaagaccacctttgaatttgtattaaaccccacacctgaggacaatgacaaaactctggcggctcttccgcctcattctctggtggtaaatgctaccgggcttggcaaggacggcccgggaagtcctcttaccaataactgtcagttccccgcggacagcttggtatgggagatcaattaccggggagatctggtctttaaggatcaggctatggcccagaaggatgagaagaagcttttggttgaagacggatgggtatactttatccacggatggacccaggtggttgccgaggtattccatacccccattgagggcgaggttttggatcggcttagcgagattgcaaaattgtgaaatatgcccagaaaaagatagtaaattttgaagaaacttcctaaatttacaaaaacggattgacagagaaaaatttgtatagtacaatccgattatgaaatgtcactatgtcataacattggtaagaaataacaataatatgagaaaatcaaggaggatgtatcatgaaatttaagaaggtattggctgcagcaatggctacagcaatggttggcgcaatggcagttccggtaatggctgaagagggtgagcagaaaacttattattatgtagctcctggtttgggccagtcctacagcattgacatgatcaagggtcttcagtatgcagcagagaaatatgactgcaagatcatcgcccagggcgcaaatgactggaactccgataccgcatgtgcagcattggagcaggtaattgccaagaatcctgacggtattatcaccgcagcctgggatgcagccatgaatcctgggatccagaaagcaaaagaagccggcattccgattatcgtagttgaggcagagagtggagagaccggagatttatatatcggacttgataatgttgacgcaggacgtgagaccgcacaggagctgatcgacattgccggagattccgggaagcttctggttatcggtaactggggatccacaaacattgaccagaaatacgagggactgaaagaggttctggctgatacgaactgggagatcgtaggtgatcaggacggcgaatgtgatgcagctacttctctgcaggcagcaaaagacctgttaagctccaacccggatattgatgcctttgtaggacttgactccgcatgcggcggcggtattgcaggggctatggaagagctgggtctggaacctggttccattaccgtggtatgtgctgaccgtgaggatgcaatgcttgactatattgcagacggctatattcaggcttcccttaccaacagaaccgcagctatgatggatctggcagttgcatgtcttgacaatgtgacaaaccatgacttcttaaatgttcctgtaacaggcgacaatgaagcatccgggatcagtgtatggcctctgaaaatgtacactggcaatgtggttatcacaaaagacaatgttgacaacttctatcatgacgcacttggagaatacggcgcagacaactacgaaggctgatgatcaacaggtatacagaaaactgcgattgatttcgcagttttcttttcaaaaaaatggagtgggtgagagatgtccggacagaatgcggagtacttaaaaatcaagaatatatcaaaatcatacggtgtggtgaaggctttgaccgacgtatcattttctatcaagcagggagagattcataccattctcggtgaaaacggagctggaaaaagtaccctggttaagatcatcatgggtgaggagactccggactcaggaaccattaccctggatggagagcaggttaaaacctataccccatcagcagcccaggccatgggcatccgaatggtgcaccaggagctggctgtttttgaaaatatgacagtggcggagaatgtatatcccagtcataatttcaggaaaggcgggagaattgactataaaagcctctatgaggaaacccgcagacagttggagaaatttggtctgaagaccgtgaaaccagaagaacagatgggcggcattaccctggccggccagcagatgacagagatcatccggtgtatcgtggcaaatccaaaggtgatcatcctggatgagcccacctcagggttaaatgatgatgaggcagaccgccttatggagattttggagcgtctcaaggcagacgggatgacgatcatctatatttcgcaccgtctcaaagagatcatgagaatatcagaccgggtcaccattatgcgtgacggtcagtatgtgacaaccttaattaatgatgacaatcttacggagaacgatttgatcaacaacatggtaggcagggatctgaacctgtattccatcaaaaatccacaggatgttgtggtaagtgaccaggtggtattcgaggtgaagaatctggcaaaggccaatgccctgaatccatccaacctgaagctgcacagaggagaggttctgggaatctttggcctggagggctccggtgtgacaaaattgtcccgtatgatgtatggattggaacgcaaggacagcggggaaatttacataaaaggggagaagcaggatcatgtgaacccaaagagaatggtggacagacgggtgatgtatctgaacaacaaccgaaaggctgccggactgcttctggacatgcctgtgacagacaatgtctctcttccaattttaagcaaggtttccaacaagctgggatttataaataataaggaattaaagcggatctccacagaatatattaagaagttttccatagcgcttccctctctgagcaccaggccaaggaagttaagcggcggcaaccagcagaaggttatgatgtccgcctgtctggcaccggagccggaggtggtgattgtgaatgagcccaccagagggatcgatgtgggggcaaaagaggagattcacagattccttctggagatcgccaaaaagggcgtgggagtgatcgtgttcagctcagagcttccagaacttatgaggctttctgacagaatcaagatcatgagagacaactccattgtgggagaagtggaatgtacagaatttactgagcagaccattatgcggtatgcggcagtgggggcatcagaggaaggagcggacagcaaatgagtacagcagcaaccgggcgaaagctcaatgaacaggaaaagaaaaaatttgactttggcggctggaccatcatctatcttacagtagccttatttatcttcttgtctctcacaaggagcaccttctgtaattttaataatatccactccattttatttgatgtgtcggtgaacttttttgccattatcggcttcaccttcctgatcattatgggtgaactggatatgtccgtgggttccatgtttggatttggcggaactcttatgggaatcttctgcattacctataaaatgccagtggcccaggccattgctctggctatggtgatcgcgggagtcataggcttcattgccggttttctcattaccaagttccggctgaattccatgatggtgaccattggcgttatgctggcagttaagggctataactggatgatgatcaccaaaatgagcggacgtcagcttccaagagagagcaggaaattcattatggacaagattgggaatttttcctgggtgatccttcttatggtggtgatcgctgtgatcctggagatccttctgaataagtcccgcttctttaagcagatgtactatattggccacaacatggaaaccaccattttatatggaattaaagccaataaggtgaaaattgtgtgctttaccttgtcagcaatgctgtccacctttggcggcgctctgatgacagccagagtgaaggctcccaatgttacagtgggaagtgatctggaggtgaccatgatcaccgctgcggtcatcggcggggccagtatcttcggaggccggggcagcatggtgaaatctctcttgggattgttgttcatctatatgctgaaaaacggtatgacggcattccgtatcgattcctatatacagcagattattttaggtctgatccttatcttcgccatcattgtagatatccggatcagcgccaagaaagcataaagggggcgggaacatgcagcagggaattataaaaaagttactgaaaaagaatgaggccattgccgctgccttatgtgtgatccttattattgtccttaccatcaaaagcgatattttctgggatcccagaaacctgcactccttacaggtgagtatcgcacctacggctatgatcgcctttggaatgatgtttttgctcatatgcggatattttgatatgtctgtgggatccatcatgcttctgtccgccatcgtggcaggaaaactgaccatgatgggagctccggtgccagtggtgattctcctcacactttgtgtgggcctggttatgggctgtatcaatggatatctggtgtcgattttagggatcaatgcattgatcgcaaccctgggtatgcagtacgtggggtatggggctgccatgcttctgtggaatgaagtgagaagtctgcaggcatttgaggattcttacattatgctgggagacggagagctgggtggtctgtatgtgatgacctgggtgcttctggtgatgatcgtgctcttcagcattttcctgaaatattccccccagggcaagaagctttactttgtgggcggaaataaggaagctgctaagctcatcggttttaatgacaaacggattcttttcctggcctatgcagccacaggggtactcacttccctggcagcaattttccgttctgcctatgtacataagccaacccagtatatgggggagggcatacacatgacctgctttatcgcctgtgttgtgggcggcggaagttttgctggaggtaaaggctcggttgtgggagcggtcctgggtgtaatctttatgtcactgctcaccaatatgtttaatcttctggaaatgagtccggaattgcagaatattgtagttggtgtgatcctggttctggttatcaccatggacggctatatgaacatgaaaaagcttcgggaacaaggaaaaatttaaccttcgtttattgactgccatgaggatggaactggttcggcttattttaaataaggaccggttctgtcctttttacattttttcttaattgaatagggttatctggaaaaaaagtggtgtaaaatggttgtagattcaagttttcggttgcactcccagaaaaaagtgatataattaatacgtgattatgtaacgttgtaatgacaatagaccttataaaatattaaatcaagaggtacggttatgtttttagaaaataaagaactggataaacatgttcccattccgctgtatttccagctgaaggaactgatcgtgaatgaaattaaaagcgggaagtatgaggtggacagcctgatccccacagagaaagagatgagtgagcagttcgacatcagccgcaccacggtgcgccaggcgatcacagagctggtccaggaggggtggctctaccgggtgaagagtaagggtacctttattgcacgccagaagatcaagcaggattttctccagcgtttggagaccttttccgagcagatgaaccggatcggcgtgacccccagcacggaggttgtggattttaaaattaccaaggccaacaaggaggttgcggagaatctgcagctggaagagggaagccaggtgatctatctgttccgcagacggttcggagataatgaaccggttgtaaccgtggagacctaccttccctatgaaaaatgttcttttatgaaggattatgattttgagaagatctctctctatgacagcatggcagccactgaggagaccaggatctacagtgcaaggcgtttcgtggaggcggtggaggccacttccagggatgcccaatatttgaacatccgtaagggagctccggtgcagcttttccataccattgggtttaacaaggacggagttccgctggagtattccattgcacggtacagaggcgatatgagcagctttcagttaaatgtctatgtagagaccaataaataggagaccgtggaccttgccgggcagcctttttttcagccggtgatccctgccgcagattttgctaaaaataatagcagaacctgcggcagtttttttgtgcacaatgccaaaaagaggaaggaagattgctttttcattgacggaacctgacaaatggattatactaaactcaaccaatgtaatgacataacaacatactatcataactatataatgatgaatggaggcgcactatgaaaaagcgtaatatgtgtaagacggtagctttgggaacagctatcgttacagttctggcaggagcacaggccgtggcagccaaggagacaggggcaaagcctgcggagaccacaaatgaaagcgttatcaatgtgaccaagttatttatggagctgccggaggacattgtgaatgtaccggacagcatgaccattgacaaggatggcaatttaattctcacagtgcccaattttgcggacacttccatgcctggctgtgttctgaagattgataaggacaagaatcttaccaagtggtttgacgttccggttaatcaggaaaccggccgtgccaaccccatgggcgtagcctttgatgaagactggaatatgtatctggtggacaaccagccgtggacaggggaagaccttaccaaaaaccaaggccgcctgctgaagatcacctttgatgaaaaaggagagctggctgcctgtacagagattgccacgggaatggagcaccccaacggcatccgcattaaagacggctatgtctatatgactatgagcagtctgactcagattgaggcagaggacggctccgggcatttggtcagcggcgtgtacaaattcccctgcgacgcagagggaattcaggtgaccaacaccctggaggatgagaacctgcttcagacctttatcaccgacaacccggactgccagtatggtctggacggcattgagtttgacaaagacggaaacctgctggtaggggatttcggagatggggaagtagagaagatcacctttaacgaggacggatctgtgaaagagatcacctcctatgcaaaggatccggagaacttaagaacaactgacggaatgtttatggatgcagacaacaccttgtatgtggcagacttttctgccaatgccattgcaaagatccgcccggacggaaccgtgaccagaatagccgccagcccagacaatgacggagcagacggagagctggatcagcctggcgagcctattatctggaacggaaagctgatcgtgtcctgttttgacaatgtaaccgatgaatttaaagtaaataccgcccatgaggcgccctataccctgtgtgagctggatgtatacgcacccactcaagaggttatggataagaccgaattatttgccactcttccagaagatatggtaaatgtaccggacagcatggctgttgacaaagacggcaatttaatccttaccgtgcccaatttcgcagatacctctgtacctggctgtgttctgaagattgacaaggacaagaacattaccaaatggttcgatgttcctgtaaatgaagaaactggccgtgccaaccctatgggcgtagcctttgatgaggactggaacatgtatctggtggacaaccagccatggacaggggaagaactgacgaagaaccagggccgcctgctgaagatcacctttgatgaaaagggagagctggccacctgcacagagattgccactggaatggagcatcccaatggaatccgcatcaaagatggttatgtatacatgacaatgagcagcctgacccccattgaggcagaggacggctccggccatctggtaagcggtgtgtacaaattcccctgcgatggagagggaattcaggttaccaataccctggaggacgagaacctgcttcagacctttatcaccgacaaccccagatgccagtatggtctggacggcattgagtttgacaaggaaggcaatttgctggtaggggactttggagacggtgaagtagagaagatcaccttcaatgaggatggaactgtgaaagagatcacctcctatgcaaaggactggacacagcttgcaaccacagacggaatgttcatggatgagaatggtatcctgtatgtagcagatttccaggaaaatgcagttgccaggatcttcccggacggaaaagttgaaagaatcgcagccagcctggactctgacggtgccaacggtgagctggaccagccaggagagcccattgtatggaacggaaaattgattctctcctgctttgacaatgtggccgatgagctgaaggtaaataccggacatgatatgcctgctactatggcacagatggatataccagaataaagaagaaggttatgaacagatgagaaaaggaatgcggcggaccgcattccttttctgctgcatacgcatggttgtccataaaacaagccggaaggggattcgcgctcttccggcttgtgcaaggcaagggtaggttttatcagggattgaccacgtagggacatgggtttcctgacagaaggtcaattaagtttttcacagaagcattggccatgttgtccgtggcttccttggtgtgggcccctgtgtggggagttgccaccacgttgtccagggccaggagcttggaattggtgggaggctccacctcaaaggcatccagtcccataccggccagtttaccgcttaataaggcctcataggcggcatcctcatcaatgatcccgcctctggatgcatttaccagaatggcgccgtccggcaggaggctgatggcctgtgcattgatgagatgtctggtggaatccagaagaggcaggtggaggctcaccacgttggagcggctcataagctcttcaaagggcacattttcaatgtcatggtctttgcagtaagcttcattaatataaggatcataggccagcaccttcatgccaaagccctgggcacattctgccaccacttttccaatggcgccaagtcccaggatccccagagtcttgccccggagctccattcctgtggaacgcacccaggcgccgtttctggtctgatcgttgagataagggatttttctggcaacagccaggatcagtccaaaggccagctcccccactgcctgggcatttaccccgggggtgttggtcaccttgatcccgtgcgctttggctgcctggatgtcaacccggtcatagccggcgccataacgggagatcacttttaaattgggacattcttcgattacatgactggtgataaaatccaggcctgccaggcagccgtcacagtccttcagaagagggatcagctcttcttcggtaagaggttttccggtagagttaaagacaagctcatctgcaaagtcccttaaaggagccagggcagcctcgtttttacctggctgcagggaggtgggagttacaagtattttcattgagaggcctcctttactttaccaggtcaaccgcctgtgcggtcaggctgcggatggtgtcaaaatcaccgctgttgataagggaatcctttaccatccagcttcccccgcaggcgatgatcttaggaaatgccagatattctttaatgttgccactgttgatcccacctgtaggcataaagcgcatggaggggaagggggctgccagcgccttgatggtatccagaccgccatactggctggccgggaagaattttaccacgggaaggtcatattccattgccatcatcacttctgagggcgtgcaggttcctgggaaaatagcgatcttgttgtccacagcccattgggtcacttttctggaaaagccgggagataccaggaaggaggctcccgcatctacggctcgtttggcctgctccacatttacgatggttcccgcacccaccatcatctgaggaaattccttaacggctgcccggatggactcctcggcggcttcggtgcggaaggtgatctcggcaacaggaagtcccccttcacataaggcctggcataaaggaagggcgtcagatacccggtctagttttacaactggcacgattttcttttgttctacttgtcttaataattcgttttgttccataattatcttctcctatgatcaaatgtgctggcagtcttgggggctgccggtaaatgcacgtacaaagttatagtgtgaaattttggctatctgcttttctgtgattccgttcttaagcatgagaggcataaaggtggtgaaaagataatccagtcccacagcctcctcctggtaagcctttaatctggccctggtggtatccagggaaaaaagaagctggctgtcataaccgtcatagagcatggactggaaaatctcaatctcctgggcatcgctgtggtagcggaaccgcccgatggtgtcatactccaggaagatccctttggccagcagctgtttgtgaatgtgcaggtccgggatggctctgtccatgtgacagaagatcatccttccaggggccacacccagatttctcagaaatagaaataattctacaggatcagagccctgttcaatatgtaccataatcggaacattcgcttttatggccgcctgggctcctgctgtaaataactttttataaacaggagttagtccctgactgtccagggccatttttacaatacctgccctggaaggtatggtttgagggtgaaagtggttgtcgatccctgcatacatgccctgggtgagttcatgatggaacaggcagcaaagctcctcctggcttttggtatagacccagtgtccgtccgggtaaaagcacagcttgtgaaagcctgtggaagccacgatctgcagccctgttctttgagagatctccaccagccccttttccatgcggttacagcctccgggctgggcatccacaagggttccacctcctgcctgaaccagccgccgggcctcctgggtgcttttgtccagatcatccatgaggagagcgggatttttttggaaggaaacacccttgcttagcagaagatgttcatggcactggcagaaacctagattttccggggaaaccgcacccaggacagtcataattttcttcatgatcagccccagttgggattgtccacaaccacaggctccccgtccttgtttacgatcagcttgtggtatccctttgtctcaatggttccgtagtcatggcctgcgtctgcggcaaaggtatagaaaagtaccaaaggcttttcaccggtgtttacggtgcggtgggcatatcttctgggaacgtataccgcctggtttttgctcaggggcatttcgatgcagtctccctccgggttttccataaccatgtagccctccccatccagggtatagtacacttctgctgtctccagtacggtgtggaaatgtccttttgtaaaataatattcttctccgatttttccgggatagaggatggtggttccaaaagccaggtccccggcccgctccgggcatccaagctcatggaattcatagatcaccgggtcgtccttttccaggatctttgccacggcctctttatcacagaacatgtccttcatttgagaaaggtggcgtttgcttgtctctgcgttttgggaaaatcctgtctttaagtcaaaatctaccaggaagcttttatcccaattaaaattattcatacgttgttacctccttgatatgataagtaaaactccattgtaaaacactatgtcataacatagctacattataatatcagtaagttgcattgtcaatagaaacagaccggaaaaagaaagaatcctggtttgtgcgccaatgtgcagttgcaaagcagctttcctatgcaataaaaaccacccggaacttttcgaaagttccgggtggattgggagggctatgaagttaaaaaacgataattccttttttggagatttttctgtccagaagcttttcgtaggcttccactgcttctgcaaaggggaagtagtcagagataaagtccttaataacaagctggccggacttgatccattccataacctggtctgtggcagctccctcttcggcttttctgggcatctgctggtagaccactctccagttataggaagctttgctgaagtcaatggtgatctcctctttttccggaacaccgtagcacagcaccgtgccacggtccgcgatcagagacatggcctggtttaccacaaagggggcaccgatggcatccagtacgtattctacgccctgaggatagagcttatggatttcttcttcaatgtttacgtttttgctgttaaagatgtgggcagcaccgtgttctttggcgctttccagcttttcatctactatgtcaatggcggtgatctctttcactccgcacaggctgagaaatttaataaaggtcaggcctaccggtccgcagccaaacacaaccacccggtcctctggctgaattccgaagtaacggatattgctcaggacttcccggaaggttaccagcattacagcgtccacagggtctacctgaggatccaggattgtctgggcgtaggcacattcagggacttcttctccttctggatactgggcggcagggtcgcacaccacagcgtactcgcttaaggccccccaggcggagcccattcctgggtagagctgaggatccggatctacgaagggcagcagcaccttgtcgcccacatggaaggtcttgcagtctgccccaacttccacaacctctcccacgccttcatgtcccagaataatgggatatacagattctggaaaacctttgaaggtcttgtggagaagctttacatctgtgccgcacatgccgcaggcgatggttttcaccagtgcctggcgggaattgtagtttggctttggaatttcacggatttctgtggtgccgtctttgtttacgataaatgctttcataataaaaatacctcctgttttaatcaatggaaaacgcgactctgttctaatgtaattatgaaactatgtcattacattaggaattatagctattatagttcaactttaagaaaaaatcaacaattacaggaaaaaattttaaaagtcatgagaattaggcattttcaacagatttcagcctgggattttggtagtatggcagacttgacaaaccacatttaaaaagttagaatgttataacaaaagtacatacaaacaaagcagaacgatagaagtgacaagagagacaagatggaaaggacgagaacacatatggggaattatatattagcacatgatttggggacctctggcaataaggccaccttatttacaacagatggaaggctggtgggaagtcaggttcactcttatgaggtccattattttaatggcacctgggcagagcaggacgcccaggactggtgggaggctgtgtgtcataccagccgcagtctcattgaaaccacagggatagatcctagggagatcaaggtgatcagcttcagcggacagatgatggggtgcctgtgcgtggacagagcggggaagcctcttagaaaggccattatctgggcagatcaaagagcagtgaaacaagcggctcagatcgaggagcatatcagccagagagatttctatcatattgtgggacaccgcaatacagcttcctatggggtgcagaagctgatgtgggtgaaggacaatgagccggagatctatgaacagacctacaagactctcaatgccaaggattatattgttctgcgccttaccggtaaattttatacggaatactctgatggaaacagtatgggctgttttgacttaaacaacctgaaatggtctcaggaactgatctcctatgcgggaattgacggggacaagcttcctgagctgaagccctccacctttgtggcagggggtgtgacacgggaggctgcacaggccaccggtctggcagaagggaccccggtggttctggggggcggggacggtgtcaccgccaatgtgggaaccggatcggttcatccgggaaagacctataactgcatgggaacctctgcatggatcaccaccaccacggagaagcccatatttgacgaagagatgcgcacagttacctgggcccatgtgatccccgggctttatgcacccaacggaaccatgcagactgctggcggagcttataactggctgaaaaataccatttgccgcatggaatgctatgatgcaaagcttcatgggaaatctccctatgattatatgaatgagcagatcgcccagtccccggcagggtccaatggcctgatctttcttccgtatcttctgggagagcgtgcacccagatgggatacagatgccaagggcgcttttctgggactgaagacagagacatccagaggggatattctgcgttgtgtcctggagggcgttaccatgaatctggatattattctgaatattttgaggagccatgtggagatcaaggaaatcacagtgatcgggggaggagccaaagggggcgtctggcgtcagatgatggcagatatttataatacaaaggttctggccccggcccttttggaggaggccggctccatgggagctgcagttaccggcggtgtgggggcaggaatttataaggattttgacgcagtggaaaaattcctggaaattcagtccgtccatgaaccagatcccgccaatgctgcaaaatatgagcagattaaggatgtgtttgatcagtgctattttgcgctgaaagatgtttttccaaagctgaacttttaaagctggcttggggcagagtacagctatacaagaaatgaattttagaatagatgggttttaataaaagagaacaccgctttgtggtcaggtatccggggtaccggaaatacacacaaaggcaggtgttctctgtgttttgggagatatcctattttgggggaattagtactaagtgagtataaaaatcaaaatatgtatggacgggcagatggatgttatactatacttgttttgttgaaaggaagcgtgaaacataagtggcttgccaagattacaatagagaaggagtgtagtatgacgaaagaggagttggccttagaggttattgagcggttgaagaaggaatatccggaggcgggatgttctctggattatgatcaggcctggaagcttctggtgagtgtgcggctggcagcccagtgcacagacgccagagtgaatgtggtggttcaggacctgtatgccaagtatccggatgtgaagtctcttgcccaggcggatgtaaatgacattgaggcgattgtaaggccctgcggccttggcaggagcaaggcccgggatatcagcggctgcatgaagattctggatgagcagtatggaggaaaaatccctaaagattttgacgctttgctgaagctgccgggtgtggggagaaagagtgcgaacctgatcatgggagatgtgttcggagaaccggccattgtcacagatacccactgtatccgtctggtgaaccggatcggcctggtggatcagataaaggagccgaagaaggtggagatggctctgtggaagctgataccgcccaaggagggaagcgatttctgccataggctggtgtaccacggacgggatgtgtgtacggccagaacaaaaccccactgcgatagatgcttcctggaggatatctgcggaaagcatggagtggagagcacagggggaagaacggcgggagaaggaagatagataaataaatggctggtgcatcctatctgaagcaggattcagacagagtgtgccagcttttttttattacgtaaaaatacctccggggtatgcagaaagctgcttggcagctgcacattggcgtacaaaactgccaagcccctgatgagtgatggaatggggagttgaagcggtcgtcttaactgtaaccagagacacaaatgtggaaataatggttgaagattcatgtaaaacatttataataatatttagatacatttacggaatatttggtgaatatttacaaaatgtttttgccaggggggaaggaatatgggaacagcaaagatgaaggtgctttttgtggatgatgaaagatttgccctggaggccatcaccagaatggcagactgggagaagctgggggtggagaaaatttataaggcatacagcatgaagcaggcccaggatatctgcacacatgaagatatggatattatttactgcgatattgaaatgcccagaggctcaggtctggagtttgttcaatggctgagagattccgggcatctgtcggtggtgatctttctcaccagccacgcggtttttcagtatgcccaggaggccatccatctgggggtgacggagtatctcctgaagcccctggacagccagcgtcttgaatccagcctaacaaaagcaatcctgctggccagggaaaaccgcaaggacagaaggacccttaaacggatacaggagctggacgcaggtcttggcaaaactacggagaatgtgcagaccgtaaaggattatatcggggaacatctggatgaacggcttaccagggaagaactggcggccctggtatatttaaacgaggattatctggcaaaaattttcaaggaacaggtgggacttcctctcacagaatatattacccaggaacgcctgaagaaagccaggcagcttcttgaaaagtccagcctgtccatctcgcagatcgccagtgaagccggatacccaaatactgcctattttacaaagctttttaaacggtacatgggggtcacgccaaaggaataccgccggtgggagagggagggtcatgagaaggattagaacattaagaggctttatcgctcttgtggtggggtgcgtcctgcttctggcagaggcggcggtgatcggatacaacgtgtatatcatccgtcaggcagagtcccaggcccgggcgtccagccaggcttccctggatctggtctataaggagctggagctgaacctgagcagggcagaggatttcctgctgagctctgtgctcagggacagggagaatcaagatattttaaatggatccagggagatcgaccggtatgtggcagaagtgaaattaaagaccttattcgaaaaaaacattgtccagtatcagcgcctggacggaattctgtggtatgcagccagggaggagatcgttatccctacagtgaagaatgcttcttctgccacggcggcagagggactgaaaagacaggcgcaccagatcgtggaggaatttcagaggaaaggccagggaagctggttcttttatacagtggatgaggcacagtacctgcttcgtgtcctggaaaaccagggagtctatgtggtgggctgggtagctgcacacagtattttagaggacgtaagcgagagcttttcccaggaggcaggtaaggtccttttgtgtgacagcacaggggccatggggaataaagggtatgaaaaaatctccatccgccggggacaggaagagatttatctggacaatacccgctgcaggttgtacagccccggcagacaggagaagatccaggtgtttctggcagttccccaaaagggcgcagcaggttttctggagcggtttggaattcagttgtttttggtggcaggaagtacggcccttctggtgtggatgatctttttcgttcttggcaggtattttatgaagcccttggagcagcttaccacagccatgagaagaataagcagcggggagctgggaacagagctgaaggaaggcggatttgaggaatttcagatcattgaccgcagctttaataccatgagccgggaaataaaagatttaaagattcatgtatatgaggaaaagctggagaagcagaaggtggagctgcaatatttacagcttcagatcaatccccattttctcaccaattgcgtgagtatgatccggaaccttctgatcattgaaaaatatgagctggcacaacggttttccggtctgctcagccaatatatccgggataacctgacgaaggagacaagagttcctctggagagggagattaacaatgtggtgaattatgtggagctgcagaagatccggtatgaggaacgtctgaagctttcccttgtgtatgatgagagtctggacagggtatacatccccagtatgatgatacagacctttgtggaaaattcagtaaagcaccagatatctccggaggatattctggaaattaaggtagaggtgcaccgggaacaggaggggctctctattttggtggaggataatggagagggctttaaagacgaggtcctccaaaagctcagggaaggagaggtcattgtccgggaaaatgtggagcatgtgggcattcataatattgtggagcgtctgcggatcatgtatgaggaccaggcatccatagagttttccaacagggaatgcacaggcgccagagtaaagatctggcttccaggaggggtgtagatgaaggcgacgattcaaagatgggttcgaagaggagtttcccttttattggctgggacagtcatcttagggctgggaggctgccaatttgaagaagaccacagggaaagtgtgcaggaacctgagtttgagaagctggtagtggtttactctggctcctacggggacagcaaggatttccgggaggtgcaggcccgggtaaatgagatcacaaggcaggagctgggggtagaggtggagtttcaggttattggaggcaccggatttcaaaacaaggtggagctaatgcttacaggaggagaacagcttgacatcctgtgcggggccaacagtctgttcatgaatgcctacatttatgatcagctttgggatctggaagaggcattgaagctttatggacaagggatcgtggatgctgtgggctgggataccattgactgctgcaggatagacggagttctatatggtctgccaaataaccgggattatgcggctgggtgggattcctatgccctgcgtaaggatctgctggacaagtatgggattcaggtccaggacatacaaagtgtggaagatctggaggctgtttttgacttgatcctggagaaggaaccggaggttgtccccctggcctgcagcgggtccttgatgtcaaattttgccctggcagatgggattaacagctttcccgcaggaggccatgagaattatggccagtcggagaaggtggtgaatattttcgagacagaagaatatattcagcagcttgaacgaatacgaagctggtatctgaggggatatttgggggaggaaattctggaaaatgcccagagcacctctgatatgatccgtaccggcagagcctttgccaaggtttccaaaaacaagccgggaatggctgtgcaggagagtctatcctgtcaaagagaagtgcaggtggtgcagcttgggccttctgcagtgagctataacagtatggccgcgtttccctggatgatcaccaagaataccatatccctggagcaatccatgaagcttctcaatctgctgtacaccaatgaagaaattatgaatcttctttcctatggaattaagggcaccaactatgtaaagacccaggacggacacatcacactgcctgagggggtgtctggaaatcccttcgcagagacagcctggaagctgcccaatcagtttatcacgtatgtttgggagggaaatcccctagacctttgggatgaaatgaggcagtacaacaaaaatgccctgcagtcctgtgagatcggctttaattttaatgtgtttcccgtggcggatgagtatttaaagctggaagagatctatggatattataagcctgtgctggaaagcggccttgtagaccccaaggaggggctggagcagatgctgggagagctgaaggaaaacggcctggataaggtgattgaggaaaagcagagacagttttccaggtggcagagtgaccagagggcagaacagggataagatagttggaaatgtacaattttatcccggaataattatatttttgtgcaatttgcggtggtatcctgagtttacaaagaaaacctgtgaacgaaaaagggaaagggaggattcaccgtgaaaaacagaaaaagaagacaattggcagcagtttttatggcatttaccatggcagcaggaggggtagttcctgcggttacggcaatgggagcagaggaaacgatccaggatgagggacaggaagccccagcccaggaaaaggtccgcaccattgttaccacagacggggaagtggatgacatggattcctttatgcgtcttatgctttactccaatgaaatggacatcgcaggccttattctcaccagctcaaccttccattatgcgggagatccccagcagggcgtggagccttaccggtggacaggaacggactgggcaggagaggttttggacaactatgaaaaggtatatgacaatctctgtgtccatgcccagggttatccccagccggattatttaagaagcattttgaagatcggaaatattaaaaacgagggtgaaatggaggaggtaaccgagggctctgaatttatgaaggagatccttctggatgaggatgacagaaccttatacattcagacctggggaggcaccaacaccactgcccgggccttgaaatccattgaagaggaatatagcggcactgaccagtgggatgagatttataaaaaggtatgtgacaaagcagtcatttacattattttaaaccaggatgccacctattccgattatattgccaagaactggccggacattaaggtgatcaatgacggagggaacttctggagatttgcctatatgtggaaatctgttccggaagagcttacaaccaagcttcagggaagctggtattatgacaatattaaaaccaaccatggtcctcttctggagaattataaattaatgggtgatgggaccattttagagggagagctggacaatgagcagagaggctcagaggattatttgatcaacaatccccagtataaccgctatgatttcatttcagagggagattccccgtccttcttctatcttctggacactggtttaagaagtctggaggatcccacctacggcggctggggcggacgttttggcgtggaagaggatggaacgtataaaaatacggtccaggattatgatatctatgcagaggaagaaagcgaggcctatacccttacaagatggtttgacgatattcagaatgattttgccgcaagggcagactggtgcgtggcacaggaatatagtgaggcgaaccacaggcctaccgtgcaggtggaagaaggcatagacctgaccgcagctccgggagagcgggtaatgctccatgcaaaagccacagacccagacggtgatctgatcaggtacaaatggtggcagtatcatgaggcggacacctatgttggggaaagtgacggacagatcgccatgatcgggcaggatacggatattatgagctttgttgtgcctgaggatgcccaggatggggatacgattcatatggtgatccaggcaacagacaatggagagaataccctcagtcattatcagagggtgatccttacagttgcaggacgagaagagatcggagagatgaagctggttcttcccgaagggataagccaggacagcgtgcctgccggtgaaaacacggcggcctatggtccaagtccctatgccctgtccctgaatgtggagctgactccagccattaatggaataaagacctataattggtctgtttcagatgaggagcttgccacaattgaccagaagggagttctcactccagtgaagccagggaatatcacagtgaccgcacagtccaaggacggaagcggaaaaagtgcacagatagaacttacacttgtggaagcgcctgaggaagaatagagaagcaaggttctatacggaagctgattaatgagaagcgcctgcaggataatgagtggttaaaggaaaaccatcttgtatcctgcaggcgcaaggaaaaaaatagctatcctctactgccaatagaggatagcccataactaaaaattatgtgttgatccgaagtgcaatcatctgacgtgacactgtcttttgattacttctaagtagattatagatggggtacttgattttttcaagtacccttttaaaatttgttggagacaatttttatatgtcaatttttatatattcaattagttgattatagggaagaactgccatttttctcttctggcggcttccgaaagatttttataaggtaatagaacatggggccgaaggttatgaacagggagaccagcataaaccaggaaccaagttccctgccgttggcgctgatccaggtgataaaggaaaaagttaggaccatggcaaacttggtggtcacaagggttcctttcaccgccaggagaacacgggcagagttctgaggggtgagggatacaccggtattccacacactgggaaagtgttcaataagggtcaccaatccatagatgaaaacagacaatacaggaagaatgaccaaggagcccttgcctccccacttgtctgcctccccggcagcattaaaatgggtggggatcgtgtcaggaatggacttccagtttatgatcagatatgcaatggtgagaaccaggataagtccgcctaatccgttaagaaaacgataaaatggtttataaggtaatttgagttctccgttgctcatagtttgcaactccttttattttttattccatttcatagcatagttgtgttggctgaaaagctttctgcaaagctccgtatttttttcagaagcatttccaaccgctgcttatctgaccttgaattctccattaatagggtactttagtatagtgtacacactactttgagtaatgtcaataataggatgtcttgcttatgtgcggcaaacaattctgctcacgctggatctgtgattttggtcaatatgccattctccatttcgtatacttcatcgcaaaggagcttgatgtcctccttattgtggctggcaagaaggatcagctttttgtcctccttcatctgccggaacagctcccgcatttctgcggtgccagttttatccagtccattcatgggctcatctaggatcagcacagatgggtcatccataatggcctgtgcgattgccagacgctggcgcatacccagggagtatttccctacaggtattttgcagtggggatccagccccactttatccagtatggaaaaaagataggatttacagcttggattacggatggtatataaaaattccagattacgaaaaccactccaccttcttaaaaaaccaggttcttcaataataatgcctgcatctgtgagcatatccagatccgttcccatcttctgaccatccacaagaatctcacccttggtgcagtggaaaaagccgcagatacacttaaacagtactgttttcccagaaccgttatgaccaacaatgccgtaaatgtgtccggcttttaaatccaaggaaatatcttttaagacttctttacccttaaaacttttgtacacatgattgacttggatcctttgtatttttttacccatatttagttttcctcctcctgattcattgatctcagatacttctatacatcttcattttcccaattaaattccatgcgcttagctttccggcaaatgataaccgacagtattgtgatggataccagtagaaaggtgagcatataagggattgaagggagacggtaatatccgccatttggggttgcgattaaagccacctccagccaataaacaggtacaaagtgtgcggccgataaccgtccgcttccgggaatattctccaccacaaacaacagacagacgagtataaaaccacctgtgacagccaatagttttccccataacatacttatcagaaacatgacaatgccaagaaaggtgagaattaatatgcatagcagagcagttaaggccataagctgcagcggtgtgaatttcttaagagcctcataggaaaaaagaaattcaacattattttctctatagaaaccggttaagcgtttcgttgaggcaagagtatagatcacttttccccaatcattggacagttggatatatccggcaaagggcagagtagttgcaagaatacagaccgctgtaagaaagactgaacgggtgaaaatccctccgatttgccccaaaacccattgctttctccccattcggataacctgatacatgttttcctgctgcataaatggaacgtcagaatttatgtaaataattccaaaatagaaaagtgagacaataaggtatgatgacatacaaaaggggaaaatgcaccatgaaataggataatcttgttcatggacaaactgcaggtatggctgttgaaagctccatgcatagattaaaaatataagaataaatgcacccactttactattaaatatctttagtctggatgattttccaatatagcgaatagtcttcattgtttcctcctacatctttcttctaagacaaaaacagcttccaatggcacacagcaatgatacaagactagtaagtaacactacaaaaagcagattcatccagtcctgctgaaaaaacttattataggcgtataaagaatagatattataaaacccattgggtccaaagcccacggagatcaagatgcgaaaaagaaccatgggtattgccagtaccaaagcccggttggagataaaaacggagcaaaacgaagcaatatttgatagtgcgccggcaagtaggcccatatggagtgaataaaacaggcagtaaagccaatagtgttcttttttaataaatgatgaataacatcctccaagccgtatatgataatcctttggatgatacactgcccagggaagctgtgtgcggcatagctgcaaaaacaaaagggttcctaagagcataaccataatcgaacttaaataaataagtactgatttagataagacatagcttttaagatttccccttatgacactataccgtatgtatttatgttccatatcctctgcatagacagtagcaaaggaaaaggcgcaaaaaacataggctaacaaggagccggtcatcactgtggaaaagttataggtgagaagcacatcctctgcaagtccatttcgatccagagagaaaaataaggatgcacacacaccaagtatccctgcacaccaggtataacttttgaaaaatcgtttgatatctgtaagaaaataacgtttaaaatgtttactcacgcttgccttcaccttctttctctgtgtattatggcagatagatttcgtccccggtaatggcattgatcattgcgatttctatattggaatgattatcatatacttcaaaataccacacaggctctgcctcatactgctgtttctcgttaaagtatactctcacggctaattttgcccgtgttacggagtaaatctgatcagtcagcagattttcatatttatccattaaaatcgaaacaatttcctcaaaaggtttaaaggctgcggtttctacatcctgctcaaattgatagggcggttgtgccaacagagtaagtagcccatctttattatacacagcagaaatcggtgctttttgataactttcaatagctctgctcataagagttgtcatcatttgcggaaatacaggaagtccttcataagtctgccatgcatagatctcataggcgttgttctcttgcgtccactcaccgcttcttaggtcctcctctccaattactccatccttaagcgcttgctgttccagcattcggtattcctccccacttgtagaaaaccaagaaaagagaaactcatctgttgggtaatggattgtttctaaaagctcttgaatgtgctccatgcaggcttttccagattcaaatgggaaattttcttggggcgccgttcgttcatcacgacgatataccccacggtatagagcactctcttgtcgataataatttaaataatcaccaatccccacaaagctctcatcaggcattatataataaatggttggctgtataccattatctccaggcggatcctcatgttgctctgaaattaccttgccttctacgaattcttcaaatgccttatctgtatcgtaatgttgtattcctattaccttaggaaaatgaaaatgatactcatcaaattcatcaggaacctccaaagtgcagttcataataaccgtatcggtctgtttggaataggttactggaaataacggctcctgtcgagtctttgattcatcaactttctgggcagaagctgccggttctatagcaactggtgattcatttgattcagaatgatgcatgctgcatccgcttaaaattactgttgcatataacaacaaaactccaaatttatttttcatacacacacctcaattagggacaaccctgatcctttttttgtgagttattatacattcaattccatgggattttagaatttgtaaaaaaagaccttcgtttttgtcaaaattgggctatatttcatggaaatatcttttgcaacaaaaaaaagaggcgaaagcctctcttctttactacatgatatgatttacataaagcaatacctgtacgcagaaccgctcctttgtataagaaaatttcatctcgcccccagctgccgaaactacccgctttacattttctaatcccagtccatgaatggtgaagttctgctgcgttgttttaaagatattatttgtttcaataatggtatgagaatagctgttttcaataaaaattagtaaaatcccttgtttttcctggatatttatggatagatatttttcctgggaattgccggcctcccgtatggcgttatctaacaaattacccagtataacacagatactaaaatttttttcatacattcgttcaggaatattgattttaatatcaatttgctttagagtcttttcagccccctgcagcagatagtttaaaagcccatcaatattgctgtttccggtggatacacgctcttctggatttaacataaaatccttcatcttatcaaggtattgtacaatctcattgtttccgtcctcttgtgccattgctgccaattctataatatgatgcttcatatcatgcctcagtgctttgacacgtatctgagattcctggactaaattaagctgatgctcatatacctccatcaactgctccatcatttgcttttccattcgtgcagaatagtagtccaaaagggaatgatatagatagaaaataaaaatattaataaacaaaaatcctacggatacaatgactatagcggtatgatattgtagaatcgtaacagcaaagtaatagatgcatccaatgctgataattgggatcatgccaaatgtgatcatatatgttaatggcaaatctatttctttatttgttttcagcgttctctccaaaataatggcgatcactagaagcaaaagacaggttatacattcatagattcgattgacaggctggccttccaggtattttaaagttgataagtacacaatactatcaaccattacattgacaacgtaaatggtaaataccataagaaatttctttgtccactttattttataaggcataaggattaaatagagtgccaggacattggtgataacattgtatgcaggtagagaaaatctcagactgatgactgcggtaaagaaccatcctatgatgtacagtatattcatatgtttccatgtgcattgctcttttgtaacaaaaatgccaatactcctttttatggcataaaatcgaattccatttgttagaaagcatagcagtatattaatcgcccataaattcattttccgccctctccaaaatcttttttcttacttgtgtacggtgcgccttgctgatattcagcacatctccattcatcatttttagctcttcataagcgaactctttcacctggtttaaattcaccacaaaggacttatgaattttaagaaacaaatctcctgggagcttatcctctagatccattaattttccataaaagctctttatttccgttgatgtgacaagattgatccttcttcctgtgctttgaaaataaaggatatccttataggggatccgaaaatatattttttggttttggtattcaaagcagttcttacagtttcctgccacccggtacacattgtccatcacggtgtaaagctgtttttcatgaattggttttatgaggaaatcaaagggacggttttggaaaagctttaaagcatactgttctacggatgagatataaattaaaaacatactgttattttccaactcatttcttatatatttaccaagctctacgccatcctttcctgggagccttatgtccaaaaaaagaatatccgtctcctcatgtcttaaatgggaatacaactcttcaccggaaaagaagacttccacttgaagatagagccctctttccttggcatattttaataagctcttttctaattctccgcaggtacttttttcatcatcacaaataactacccgcattttgccacccccaataaaaaataagtgtcagaaattactatatcgacataataccatattcaagataaaaaatctacgctgatatttctgctaattatatataatatctacaattctttgtataagacagtttagtgcagcttattttttgaatcttaacgtttttagtaaaaattgcgcttttaacgttaccgaggaagtccttcaaaattttaaatgtatatttttaaaaaccacactggaaccttctgctcaggtgtattatactgaaaatagaacgtattatatgctattgtcgaaattattgttaacagcacagggcaggaaaagcccggaaaggagtgacggtcatgggaattgaagcaggcataatggttccccatccacccttgatcatacctgaggtgggaaagggagaggagaagaagatacaggccaccatacaggcataccatcaggcggcagaaaaggctgcagagattcagccggacaccatcgtagtgatctctcctcacagtgttctatacagagattatttccatatctctcctggaaatatacttaccgggaatatggggcagttccgtgcttctaaggtgaagatggaggtgcgctgcgacacagaatttgtagagagcctataccaagagggcgaaaggctgcaaatgccctggggaaccttgggagaacggaaggaggagctggatcatggcacaatggtgcccttatatttcatcaaccaatattacacaaattacaggcttgtgcgtataggactctctggtctttctcttccattgcactatcgtctgggacaggcaattcagaaaacggcacaggtattggaccgaaggacagttcttgtagccagcggcgatttatcgcattacttgaaggaggacggtccctatggcttccataaggaggggccggagtatgacagacagatcatggagattatgggagctggagaattcggagggctgtttgagttttcggaaggtttctgtgagagagcaggagagtgcggccatcgctcttttaccattatggcaggggctttggaccagcttcaggtaacggctaaaagactgtcctatgaaggccccttcggtgtggggtatggaatctgtacttatgaggttaccggtgaggatccatccaggaatttccttgagcaatacaaggacaccaacaagaaggacagggatctaaggcgggagcaggaggatgcttatgtggctctggccagagaaaccctggagcattatgtgacaaagggggaaatgccaaggcttccccagaatcttcccagggaaatgctcaccacaagggcaggcgcatttgtctccattcatgaggacggccagcttcgtgggtgtatcggaaccatttccccggtatatgactgtatcgcaagagagatcatggaaaatgcggtgagtgcgggaaccagggaccccagatttcacccggtatgggaacaggagctggattttctggaatatagtgtggacatcctgggtgagccggaggagattacctctcttgaggagctggatgtgaagaaatacggcgtaattgtaacaaaaggacggaagcgggggcttctgcttccagatttagagggtgtggaaaatgtgtaccagcaggtggcgatcgcaaaggaaaaggcgggaattggccgggaagaccggaatattcgtctggaacgcttccaggtgatcaggcacggcaagaaagactgaaaggtccttggaggagatctctttgcagggaaaaacggtcaggtattcatagggcatgcccggatgggaggatgtatgaatcagatctgtgacgtttgtatgcatcattgtaacttgaaggaaggtcagtacgggctgtgccgggcaaggaaaaaccaggaggggagcattgtgtgcgccaattatggaagagtgaccggaatggccctggaccctattgagaaaaagccgctgaagcggtttttcccaggaagccggatcctgtccattggctcctatgggtgcaatctttggtgtcccttttgtcagaatcatgatatttccatgaggggagaggaggcccggtggatctgcgtttccccggaggaggtggccgaaaaagcagtttttttaaagccaaaaggaaatgtgggagtggcatacacctataatgagccctgtgtgggttatgaatttgtacgtgacactgcctgcctcgtccgaaaagccaagatgaaaaatgtgcttgtaaccaatggatgtgtggaaagctgggtggaggatcagcttcttctgtggatagatgccatgaatattgatctgaagggatttacccaggagtactatgaggagctgggtggaagtctggatatggttaaggcttttatccaaaaggcagttcccaattgtcatgtggagctgaccaccttgatcgttcctggaaagaacgacagcgaacaggaaatggacaggctttcttcctgggtggctcagatagacccggagattccccttcatgtaacccggtatttccccagatggaaaatgtgcagtggagagcccacgccagtggacagggtctatgcactggcccaggcagcacgaaagaatctgaaacatgtttatacaggaaactgctgaaaaggaaggataaaacagagatattttagatactcttccatcattttacaaaagttaaagaaagaataccgcttaagggaagttgtaaggagaatcgtatacaaatattcttaaataaggtataatagttgcacttaggattgggaataccacagaccatggcagagagcaggacgagaatacttaggaggcggaaaagtgaaggtattaatagcagatgatgaaatgaaggtatgcaggctgattgagcatctggtggattgggatgctttggaaatggagatcgtggggattgtcaatgatggtaaagcagcattggaagccgttgtccagaagaagccggacattgtcataacggatatccggatgcccagctatgacgggctggaattggtgagaagatgtaaggagatccatccagacattgattttatcgtgatcagcggatacagtcagtttgagtatgcccagcaggccataaagtatggagtaaaggattatctgttaaaaccgctgaagaagagggacctggagaatgtgctatatgaaattaaggaatcccatgaatccctggtgctgaacaatcagaagcaggaggagatccagtccatgatccaggcatccagggagcaggtgagagagaattttctcttgaagattctgcaggcctccaagaacagccctgtttccagagaagtaagggtccaggaggtgaatcagcagtacggctgtcactttgtggaagggttcttcactgttgtgaggatccggccatttttttcagatggagcgatggaggaaggggcagaggacttcttcatgaataaggtccatcaattggtaaaggacaagattgggaactgttgcattgaattcttgtcaacggtctatggagatgaaatggtgtatttattaaatacagacagcagggattttacccagatagagaagaattttaagcatattaaaatagacctgtgcaatttcaaagaaatattccaggaggtgaacctggtcatcggggtgggcgggacctactgttctctgggtggtattgaggagagcctgcaggaggcgcaatatgcggtgatgaaccgcatgggacaaagggacagcttttatatcaggtactcgccagactcctcaagcaagaaaagcagcggggatatttttgacagcagcattcgtactggaattttgaacagccaggaaagaatggatgtggaaggggttaaaaagcagatattgaacttgaaggcggctctggagccttataagtatgacgggaaattggtgtatgagtgcttcctggagctggcccagacacttcagttcggtgtaaagaattatagggaccagatgggagttcctctcacggaaaattatcgaaagcattaccgtacactcatgactttccaggacttattccagtggatcatcacggatattgacagagaatacacaatttatatgaaaaatatgaaagaagcggaaagtaagcctatccgggatgcaaaaaaatatatttatgaccattttgacaagcatatcagtctggaaagtgtcagcgaatatattggttttaattccgcatatttttctacgttgtttaaaaaagagacaggaaaaaatttcttggaatatgtaacggagctgcgcatgcaaaatgcaaaaaactacctgatccagaccgactatgatattgcagaggtagccgcagcggtgggatacagtgacctgaaatatttttcaaagctatttaagaaaatgtcgggccttagtccatcagagtttcgaaggctgtacagctaggggatgagtgaagatgaagaagaaacgcatatttggaaaggaagcccttggctgggtttgggggattctgatcggagcggttgtgatccagacaggggaaattctctgggcagtgggagtgaaggccctgtcctttcggggaatggtcaccgcactggtgatcacggctgctgtgggggcaggagtgggcacactgctgtgcagactcctcataaaaccttacagccacagtcagaatcttttccagtattttgcccagagcggcaattaccaggagctgatgaacagcgagtatgagatttttgagggacagaaccaggtgatgaaaaagctggacgccatgctggacaaacagaacattatccaattatctaccaagcatgcagagctgctggcccttcagaaccagatcaacccccattttctgtataataccctggatgccatccggggagatgctctgtgtgaggggattgaaagcattgcagataccacggaagcgttgtccacctttttccgttataccattacggatacagggaaccttgtctctttagaggatgagctggagaatgtggaaaattattttaagatacagcagtaccgttttggggacaagctgaaaatgaaggtggtttttccagatgactatgggaaggtccagcagtgcaagcttcccaagctcaccctgcagccggtaattgagaatgccattttccacggactggaatccaaggcagagggcggactgatcaccattactattgatattacggataataaattgttgttaagtattcacgatgacggagtggggataccggaggaggagcttcgcaggatcaacagcagactggaggatatctccaatgttcccacagaggggcacaaaaagggcggcattgccctgccaaacgtggccagaagaatcaagctgctgtttggtgaagagtacgggatacatatctacagcattcctaacctgggcacggatgccaagatcacggtgcctattgtgagcagccatggataaggagcggacaagttggtgaaaaaagaaacgttttcagtggagaacggcaaaattgtaaaaaacggaaaccggatatttgaggatttgtctctacggttgtttcaaggggaaataactggaattgtctttgacaacattttggcacagaaggtgtttctggagtttttgcggggagacctgcttctggaggcagggcggatatacctggatgaaaggcgggtcacctttcaaagcgccgccaaacaggctgcctgcctcacagccgtgatcagtacccggagcaagctggtgcagtccattaccatagaggaaaatatcttccttttctctgataaaagaaagtttctcagtcaaaagctttaccgggaaaaattccaggagttgaaaaaagaattccaatgcctgggtaacattccccataaagtgaagaatcttactgccaaagaaaaggtcatggtggaattattaaaagcttatgtggaagacaaaaagatcgtggttttggatgaaatcgccagcagcctgccggaaaaggatctggaggaggtttttggactgatcagtaaaatgaaggagaagatgacctttgtgatcaccattggctttgaggatacggtgatcaagtggtccgacatttttgtggtggtccagaacggcaaaaccatctatatgactcagacccaggttcttaataaaaagctgaatcaggtgctaaaggccctgctcaatgaaccacatccccaggagccggaagtggagccctataccagcaccatgccaaggacaaagaaaaacatttttcaggtgattgaggcaagtacggattctctttatggattaaatctctctcttcgggcgggggaggttttgaacatttattatggggatgaggagagcagggagcagttttggggcttgcttgcaggagaggtgcctctgcggcaagggcagatcctactggacgggaaggtatatatgccccgttccatgagccaggcagtggctttgggaatgggctttgttacagaggcgccctaccggtccatgctgatggacaatctatcggtactggagaatctcagccttcctctccaagagaaagtgaggggcttctggctgttcagcaaatatgcggccagtgtgagagaatccctgcggggaatgaaattgaaggaaaagaagctgaaaaatgtaagtaatgcggatcttcagaagattgcctatgagaagtggatgctgtatctccccaaggttcttcttgtggaaaatcccttctcggatatggatgtgaacatgagggagatcaccattgacatgctcacaaaccttcagaaaagaggaattgccattatcattctcacctccaatttttccaccatgcataagatcaagggaaaatccctctatcttcagagaggaaggattctggaggagggggaattgtgggatacagaagaacaaagaagacgaattatgtgaaagtgataaaaactttggataattcgtcttttttttatgtaaaaaataagaaacaaaaaaataccaccctatttccaaatattgaaagttgcaaagaacgtcgaagaattttactatatgtgtacaaaataactaacgggaggtttttaaaatgagaaagagatcagtaagtattttattaagtgcagcaatggttggagctttaggttttacttcaacaggagttcagacagtaaaggccgaggacctgaagattttgggaactggtatttattctgcttctgacaacttcaatacttatattggcaaagcgatcaccaatgcctgtgacggtatttttaagaccaatgtggaggatggccagaatgaccagtcaacccagaacaaccaggtggataccatgctggcaaagggagcatctgccatcgccgtgtccgtatgtgatgtgacggcagctccctcactgatccaaaaatgtaaggacgcaggaaatgtgcccatcattttcttcaacaaggagatcaccgattatgatctgatccagtcctatgaaaatgcctatcaggtgacctccacaggaggagactacggagctgccatccaagcagaaatgatcgtggaatactggaaggagcatccagagatggacaagaacggggacggaaagcttcagcttgtatatctcatgggggatccgggacacaccgcagcccagccaagatgtgattacttaaagagcagcattgaggacgcagggattgagctggaggttctggctgaggacacaggcatgtgggtaactgcaaacgccaaggaaaagatggatgcctggatctccaagtacggggatgagattgaatgctgcgtggcaggaaatgacgcgatggcgctgggtgcactctcctctgtggaagcagcaggttataacacagacggggaagagagcagcaaatatattcccatttatggaattgatgcccttccggaaattctctccaagatcaaaagcggggaaatcgcaggctctgttctccaggacgccaaaacccagggacagatggttgtgaagatagcagaaaacctgtccaacggcaaggatgccatggacggaatcgattttgaaatggaagaggaggccaaggccatccgcgttccatatcaggctatcaccaaggacaacctggatgtggcagaagcgacctacgcagaataagacaggaaccaggtgccggaccggtatggcccggcacctgtcaagaagagaaaaggaaagggttttaggatgggaacagagtacatattggagttaaaacatatttcaaaatcatttcctggtgtaaaagctcttgatgatgtaacactgtgtgtgcggccgggtacggtacactcgctgatgggagagaacggagccggaaaatccaccctgatgaaatgcctgtttggtatttattcctatgatgagggggagattattttagacgggaagaaggtaaaattctccagtccctcagaggcgctgcaaaatcaggtatccatggtgcatcaggaactgaatcaggttctgaaccagacggttatggagaatttatggctgggcagatatcccatgaagcatggcttgatcgacagccagaagatgtataaggatacgaaagaaatcttcgatgacctggatatccaggtagaccccagagtaaagatcggaaccttaaaggtttcccagaagcagatgattgaaattgcaaaggcagtttcctatgattccaaggtgatcgttatggatgagcccacctcctccctcacagaaaaggaagtggagcatctcttcaggattattgacaagctggtgaaaaagaataccagtattatttacatatctcataaaatggaagaaattttgcggatctctgatgacgtgacggttatgagggacggtaaatggattgatacacagccggccagggagctgaccattaataagatcatccagatgatggtgggaagggagctgaaggaccgctatcctcagaaaaaagcagttatgggtgaggtgctcatggaggtgaagggcctgtccaccgccaatccggcctttgaggaggtgagtttttcccttcataagggggagatcctgggaattgccggtttggtaggctctaagcgcacagaggtgctggaaacgattttcggcatgcgtttaaggggaaagggacagattcttgtaaacggaaaagaggtccagaaccgcacgcctcaggaagccatggcaaatgggtttgccatgctcactgaggagcgcagggctgacggtatttttgggaatctgagtgtttcctttaatatgaccattgccaatctgtccagatatgagaagcaggggcttctcaggggagactctatgaagaaggacacagaccggatgatccaagccatgaaggtgaaaacgccttctatcaaggcaaagatcgggaatctgtcaggggggaaccaacagaaggtgatcctgggccgctggcttttgacagagccggagattctgcttctggatgagcctacaaggggaattgatgtgggcgccaagttcgagatttaccagcttatcaatgaactggcagaacaggggaagggaattattgttgtaagctcagaaatgccggagctttttggaatttctgaccggattttggtcatgagcaatggccggcagtcagcaatttttaactccagggaagtgggccaggtagagatcatggaggcggcagccaggttcatttagccgcagttattaaaaattcaggaggagattcaggtgaaaaaattccaaaacacatcagtgaaagagctgttggccgagaaggccatttatattgtttttatcatcctgcttatagggatcattgtggtagagccaagatttttgtcctttaacaacttcaaaaatatctttgcccagtcagccacgaaaataatcattgcactggccgcgggcatggtgctggtggtgcagggggtggacctgtccacaggccgtatgattggacttgcggctgtgatctttgcctccctggtacaggagccagattatgcatacagaatgtaccccaatttaaaggagctgcctttgatcgtgccccttttggtggtgttggcagtgtgcctgctgctgggggggatctccggcctggcagtggcgatcttcaaggttccaccatttattgccaccctgggcatgcagttgattttgtacggggtgtcctctatttattttgaccgtcctccttacggggcacagcccattggagggattgacgctaaggtgaccaagatcgccatcggctccatcgggatcggcgagttccagatcccgtatctgatcatcatagcctttgtggtctgtgtgatcatgtggattgtatggaacaagacaaagtttggaaaatatatgtttgccgtgggaggaaacccggaggctgcgaaggtgtctggggtaaatgtgattaagactcagatcatggtctatgccattgcaggcatgatgtatgctctggcggcggccttggaggtgggccgtattggaagcgcctccaatacaaccggaaacggttatgagatggatgcggtggcagcctgtgttattggcggcgtgtccctgtccggcggcgtgggaagcgtggggggcattgtcatcggtgtattgatctttacggtgatcaattatggccttgcatttattggcgtgaatatgtactggcagtatattgtgaagggcctcattatacttctggcagttatcattgatatgagaaaatatgcaaagagaaaataaagggaaggttagaaaggagtattgaatatgcgggagacagtaaaaaagacaaagcttacggagaactgcagcaaggagaccatccgcaggtttgtggaagaagtgacgggcgagctgactttagaggaaaaggtgggcatcatgtccggccaggtgacggagcagaagcttctggatgatctgttccttattgagcactacaatgttaagccctaccccaccatggccgtggaccgtctggggcttcccaatgtccggtttgtggacgggcccagaggggttgtggccgggtctgccacctgctttccagtttccatggccagaggggcgtcttttgacagggagctggaggaagaaatcggcaaggtgatcggggcggaggtacgtgcccagggaggaaattatttcggaggggtatgcatcaaccttcccagaaatcccagatggggccgtgcccaggagtgctacggagaggaccagtatcacctgggagaaatgggtgcggcgctcaccagaggggtccagagtcagaatgttatggcctgtataaagcattttgccatgaacagcattgaaaatgcaagatttaaagctgatgtccacgcagataagagaaccttgtttgaggtctatctgccccatttcaaacggtgtattgaggaaggggcagcctctgtgatgggagcctacaataaggtctatggggaacaggcctctgagagcagatacctgctgaaggatatcctgcgggataaatggggatttgaaggcttcaccctctccgatttcctgtgggcagtgaaggatggtccaaaggcagtgaaaaacggcatgaacattgaaatgccctgtttctgccactatgtggaggagattccaaaggcggtccaggagggaagtctgtccatggaggacgtggatgaggcagtggggtacattctgcgcacccttctatactatgagacaaggaaagatcccagggaatatacaaaggatctgctggcctgcccggctcacgtggcagtggctaaaaaagcggcccaggaatccatggtgcttctgaaaaatgataaccaggttcttccctttgccaaagataagacagagaagattgtggtactgggtgttttaggggacacagagaatattggcgaccatggctccagtaaggtacatccttattataccatcacaccctttaaagggatcatgaaaaaaatgcccacggcccaggtgctgtattacgatggcaaggatctgaagagggcaagagagctggcggcagatgcagacgcagtagtgatcgtggcggggtatatccacagcgatgaaggagagttcctggcagaccgcagcgatatcgcagaaatgggcggagaccgggcaagtatgcgccttcaccagagagatattgatctcattcatggattaaagggagtaaaccccaatacggttgtgtctattgtgggaagcagtgcaattttaattgatgagtgggagatggatgttcctgcgattctcttttcgttctacagcggaatggagggcggcagtgcactggcagatattctcttcggagatgtgtgccccagcgggaaactcccctatacagtggccatgaaagaggacagctatccggcctttgacccggactgcacctatgcagagtatgaatattaccatggatactgcaagatggagaaagagaatcttccggtgctctatccttttggatatggattttcctataccagcttttctatcagcgcaccacaggtggaggtgtttgaccgcactgcgaaggtaacggtacaggtgaaaaacaccggatctgtaaaaggcgccgaggtggtacagctctatgtgggctgcaaggacagcacagtggaccgtcccgtaaagcttctcaaggatttccagagggtggagttagatccaggggaggaaaagaccgtggcgcttcatgtacgtgcggaagatatggcttattactgtgaagagaaggatgcgtttgtggaggaagaaattacttacattgcttacacaggaaactgcagcaggatggaagctctgaaatcccaagaatttcaattttaagcttagtaaggatgcggtggagcggataacgggtacctgcttcatcacagggtagtagtttttggaaaaatagaagggagtggacaaaacgatgagaattggcgcagattattatcccgagcactgggatagagggcgctgggagacggatgccaggatgatggcggcagccaacattcaagtgatccgtatgggggagtttgcatggagcctctatgaaccagaggagggacgctatgaatttgcctggatggatgaagccctggactttttccatcaatatggcatcaaggtggtgctgtgtactccttccgctacgccccctaaatggatggtggatcaatatccaaagattcttcaggaggatatccatggaaatcccaagctgtttgggaccagaaagcattattgcttcaacagtgaggtttacagagagaagaaccggaagctgatatccatgctggcccagcgttatggggcacatcctgctgtggaggcctggcaggtggacaatgagctggggtggtctaatactaccaggtgctactgtgagtcctgcaggaagaagtttgtaaagtggctggagaagaagtatggcaccattgaaaatttaaataggatctatggaactgtattttggagtcagatttatagaagctttgaggaggtgattcttcccaaggcaggggcctgctacgatacctgccatgatacccagggccaaaacccggcgctgcttctggattattaccgcttctgcagtgattccgttgtggactttaccagtatgtccgcagagattatccggaaatattccaagctgcccattaccagcaatcttttggatgcggcagtgaattcaggaacagggattgactatttccaactgtccagagaattggactttgtcacctgggacaattatattgaatttcagtggggaaaggccagaccagagactgtatccagagaccactccctgctgcgcagctacaaaaagcagcccttctgggttatggagcagcaggcaggcccctgcggatggagcaagatggggcctgcccccacaccgggcaagctccgcctatggacttaccaggcagtggctgaaggagctgacacggtggtatatttccggtggcggtcctgcccttatggtaccgaggagctgtggcacgggattttaaatcatgacgggaaacccaaccggagatatgaggagatttcccaagtgggcagagagatgaaggatttgagtaacaccttcggaccacttatgccaagagccagggtggcggtcattaaatcctttgacagtgagtggagccagtccattcacagacaggtggaaaatctccattatgattccctccttctggattattaccgtcccttctgccagatgggcattccagtagattttgtggctcccggggaggacttgaccgcttatgatctggtactggcccccatgcttatgatggctgctccccaggaaaaggaaaacctgaaggcttatgtggcgggaggcggaaatctgctgttttcgttccgaagcgggatcaaggatatgcacaacaatatgcttacccagacagtccccgggattttcgcagatctggccggtgtgcaggtggaggactatgatcccctgctggaaaagaccacacaggtgtcaggggtattcggtaagggcacagccagcatgtggtgtgatgtgatccggctggatggggcgaagaccttgggtgtgtatacctcagattattattctggccagccttgttttacagtgaatcaggtaggaaagggcaaggtttattatgtgggctgtgatctggatgaagatgccatgaagcttctggctgtttatcttggaagggccgctgggctggatatggatctgtaccagattgaagggctggagacggtggaggccacggacggtgagaaccgtgccctgtttttgatgaatcacaatgcgtatcccgtggtggctccagtccccggtaaagtgcgggatatgctctctaaggaggaagtagattctgtggctgagctggagccctatggagtccggatcttaaaactgtaagagacttaagatcatacacaaaggtatccgattgacggatcctgaaataaatgggcgcaggccaatgtcaggaaatgacacgggcctgcgcctttttctcctgttaggatcagcaagtggctgccacacacaggggctttccagtgataataattatgattttaaagagacataatcaaagaggctcatttgctggctttcttttttctgtctgccggctttttccttaacaagaagccggggtgggatatcctctagaaatggagagggttccttggagcaggtgagaattaattcctcctttgccctggtcattccaacaaagaacagacggcgttcctcctgctcatcacagggacggccctcctttttcaggggcatggtgcctttgcgggctccgtataggaagaccacagggaattccaggcccttggccccgtgaagggtcatgagggagacactgtcagagcggtaagattttccgccgcaccggtgcagatccccctctccgtctgtgagaagtccttccagcatctcttccatgtttttgtaaaaaacagatacgcagaccagctttgtcagggaggggtgtgagggagctttcaggtcctccatccagctttctagaattttgccgggttttcccttggaaagcttggactgatatttttcctccatattttttcggatggtgtctgccagctcagtggcttccagaccccacagcagctccaggcactgttctcttgcgctgtgatcctctgggtggagcatttgccagaagaagcacagggttccctggacaatggggtcctccaggaactcttcccgcccggtgaccacgtaggggatgccctcttttttgaagcatttttccaggagctctccctggcggtgggttctgtacagtaccgcgatctccccgaagcctcggattcgctgcccatgggttctctggcggtctccctgaacgtccagcatgtccatgccgcctaccatgcggttgatctctttggcaatgaaaatgctctcctccatctctgtgctgccctcagccacacgtatgggggtgtcttctttggcaaaagcgtggaggcttctggcttctccgggattctgggagatgacctggacggctgcgtccacaatggacggggtgcaacggtaattttcggtgagacggatcttgtgtatttccgggtaggactggaacagccattggaagcaccgggagtcagagccccggaagccatagatggactgatccgggtcaccgatgacaaagagctctcggcccttttggttccaggaggagatgagccggtactggatggggctgatatcctggaattcatccaccaggagataggaaaagctcttctcccaggcggcgttttcctgcgggctgttttcctgtattgtgttccacagatccagggcctttacaagaagatcgtcaaaatccataagcttttgatggcaaagctgtgactggtaccaggcaaaggcttcctggaaggggctgtcctgtgcttggggatccccggtcttccaaagagacagcagccttagaaaatccctgggttttacatccagacgaaaggcagagacagcctccttggcaatttttaaggcggtagcctcctgaatcagatggatgggtatgccatggtcctttaaatattcagtacacaaggcatggaaggtgccaatgtgcatccgctttacagtctgaggctttcccagctccttcacaagacgctggcgcatttcctgggccgcctttttggtgaaggtgacggccgtgatctcggagggcttgaccttgcgcaccttgagtaaatagacgattctggagacaagcgtcttcgtctttccggtgcccggccctgcaatgacggccacggcccgggacagatccatcacggcctcctcctggcccggattgagggcagcagtagaaagtgcaggcatttcctgcctttgtgaaccagatctttgaatcagtctttgggaggatttctccatttcttttgaaggctgtccggctgcttcctgggaacttaccgtttctttttcggcggccttctttgtatcctgggccattgcggcaaaaaagctgagctgtccgtctgtattattcaattcctcctgggagaacagggaaatggttccgtactcgccgtcaaagccgggatttcgctgaacctttccttccctgagtctgcggatcccctctccgatcagttcgcctgcctggtgccggatgtcttccacgggaatctctcttaaaatagggaattccggtccaagctttgccagcatttcctggtactttcgcacaaccgctgtgctggctgaggattttcccatggatgcgccgatgacctctccaagggggacaagactttcgtagggttttccctgaggcagcacaaagccctcctggcggtccgcaagctgaacgatcctgtgggagacgccgatggtaagctttttgccgcacaccgggcattttccctggtatttttctgcctgggcaggactaagacacagatggcatttcctatggccgtcataatgatattttccctcctccgggaaaaattcgatggtcccagcaagtccttttcctgtctggacagcctcatacaggccctggtaggacaggtccacagccagtagattggcttctcttcccagcttggcgggagagtgggcatcagagttggagatgagctggtacttgtccagggcagagagctgccagttcatggctggatccgaggaaagccctgtctccatggcatgaatgtaaggggtcaggtcctggaagcactcttccaccgtatcaaagcctgagaaggcgccgaacagggaaaaatggggcgtccagatgtgagccggcacaaaaatccctcttgggcacagctccagcatgatctccaggagatctctgcagtccagtcccaggatgggccgtccgtcagaatggacattaccgatggtctccagcttcttggccagcctgtctgcatcctcaaggcttggaaggaggatcacgttgtgaaccttgcgcacttttccgtttttcttgtagatggaactgatctcgccgctgatgacgaaccggggaatctgctcttcgctggttccaggatctgagatccggtattcctcttttaaggtgtaaagtccctcctgggcaggctgcagcttttccatgagctcctgcctccaggccgggtgggtaaaatctccggttcccaggatgtggatccctttttttcttgcccacagatccagatgctccggggtacactccttgctggtggccctggaatatctggaatgaatatgtaaatctgcaatatacatagtttgcctccattgcttcattgatacctctagtttatcattgttaggtaagagcaacaattaaatttctgtaaagaaagctggatcagctcaatattttttttgcgctgggagacaatttttatggacattgggacaatcctgggctattatgaacttaagaatttatgggggaaacagggggattcctatttccgggaggagggacttatttgaagcagaagattatcttatcccatgagatcaagcgcttcggctgcggtattgtggcagcggttatttttgcagtaaatattaaaacctttgtgagggccggggggctgtatccaggaggatttaacggtgtgacccttctcatacagggaatctgccagcagtttctgaacattgcggtaccctttacgattatcaacctggcgctgaatgccctgcccatatttattggctttcgttttatcgggaaaaaatttacggtgagttcctgctgtgtgattatacttaccagtgttttgactgatatgatcccttcccagcccattacttatgatccccttctcatcagtattttcggcgggctcatcaatgggtttgcggtgaccttgtgtcttattgggaatacctgcagcggtgggacagactttattgccattttcttttcggaaaagagcggacgagatatttggaactatattctctgcgccaatgctgcagttctggtgatcgccggtctgctgtttggctgggacgtggccctgtattccattatctttcagtttacctccacccaggtggtgcagatgctccaccagcggtacaaaaagcataccctgttcattgtcaccagccagccggaccgggtatatgaaagcattatgcaccttacccatcacagtgccaccaggttcgagggaactggctgttatacgggcaatgaattgaccctgctctactccgtggtttcccgggaagaggctaagatccttgtaaaaaaggtgacggaggtggacccggaggcctttgtgaatattattaaaacagactatatcaacggccgtttttatcataagacggattattaatacctagaaaatcccatcagggcggcacaacataccacctgatgggattttcctgttatagtaaaacgttctgggaggatgtacacaaagtgctaaggatacattggctcacctttgtttttgtagatctgtcagattttatctgcggccagcagatagaaggtcaggtatccggtgtcgtcatattcgcccagccttccgtaaatgcggaaggttccgccttcattgatggggaagggctcctgttgacggcagtccactaccttaatcccggcttcccctgtctccagccagccgccctcctcctggaaatctgcatagtacagccggttatccgggtaggaagaccaaacatacacaggaagggcgtaagtgcctgcaaagtcaacatagccgctggaataaagattgtcaaactctgccgttgtctggatgtattggcaggtctgccggatatccgactccggctcccgggcaggggcttggtagcccgccatctggtccttataggcctgggagatgttctggttcaggaatacaatattactttgctccacctggctgaacacggcagaatcaaaggccgctgcctccaccgttccggtgtaccaggactttccgctgaaaaactgctgcatttcaggcagctcaaatttcctgccgtggcgtgcatagatctcattgatggccatctgttttttctcatcgtccagagactggatatctgccgctgtcaggtatctctggctgctgtccgggaaaatgtaagtgttatggctgaggaagttgatgttccatagctcgatctggctgaatacagtttcactgaaggactcggcggggatggtgccctggtaccagctttggccgttaaaataggactgaacctcaggtgttgtaaagagtctgccgtggcgtgcatagatttcattcacagccatctgtttcttctggtagtccagtgcgttgatctcattgtttgtgagaagccgggtgctgctgtccgggcagatgtaagaggaatccgatattttcaggagcatgatattctgtgcctcaatctggctgaacacatccacggtaaactcctgggaagggatcacccctgtgtaccatgcttttccattaaaatattgttgtacctcaggccagtcgaagagtctgccatgacgtgcataaatttcgttaatagccatctgtctccagtaagtatccaggctgttgatctcatcactggtaagaacccgggagctgctgtccggcaggatatagtcccaggtgcggtcctctgcctgaagtgctcttacagacacaaagtctgctgggatcaggagtacactgcacagagctgctgccaaaaatctttttgttattctgcacaatttatcaaaatttttcatataattcactcccttcactcttaattgtctgtcaaattttgatgattttattttatcatagaaattgtacgtttacaatagaaatagaaaagagtgagggttcggatggtcagcattcattgttttggcaccggcagtttaatttttattctgcctttacgtaagcggttgttctgccaccgccaattttaattaaatatccttcttttgtaagctccgccagcgttctttctactgtaatcttgctgatatccgggcatttttccataatttctttctttgtaatttttccaaccttatggtcgatcacatagcggatacgttccggttttgacagcggcttattatgcagatattccacacgatcttcaaattcacggtaagctttcaaaagaacgccaagatagtatttaacaaaaggctcataatcattttcgttctcatgccagtgatgggagcttgcttgtaacgcttcataataggtttcctttgacttttcaatgagcatttccacactaatatattttcctactatatatccagccttataaagcaaaagcaatgtaagcagccggctcattcttccatttccatcattaaatggatgaatacaaagaaaatctaaaataaacataggaatcagcagcaatttgtctattttatcctcattccatgcatctataaaatgagagcagagcatatccatggcttccgcagtctgaaaggctggtacagggacaaaccgggctttttgatttccttgggaatctctttcagcaattacattatccgagtttttaaaggagccgcctgctctgccctgggaaaaggaatataagtctcgatgcagctgcaaaatcacattaggacggggtataatgtaatcatggctctcgtgaattgtggcaagaacctcccgataaccggcaatttcttgttctgaacggtttcttggctctgatttattgtgaataagctcctctagtctctgatcactggtaaaaatgccttcgatacggtttgaggcacctgtactttgtattttagccacttcaagcaaagaacttaattcatccacatttgcttccaaaaataactcttgtttacctttatgttcatggatggcagtaagcatctgaatgatttctgaagtataaagtttttcgggcttatcaatataatcaaaggttctcatgttaatctccttcatttctgtaatatctacatcattttatcatgatatgatgtagttttagaatttatgatgtagattattcttcttttactgatcgtaaaacagccgggcccgctttgtccgcttacatgagatatatattggcaaccgggatcctgcttagtatgaagatcacttcaaggctgaacaaaaatgcgatcattgagatcatggggatggccaggatgggattgaacattgtggtattcagttccaaataccgcgtcacgaaacggatagaaaactcgtggataagataaatcccgaagctgagatttgagagaaataatataaatttcccttgttttttgctgaagcggatctttgacaccacgttgctgaaaaatacaaacaaggcaacgccagctacatagctgttgggaagatatcttgagtaataatctgttacggacttacctgcctcaatggatgccttctgggtaagcaggacggtggacacaactcctaaaatgccaagaatatacaagatccagcttttctttcccttcacgggatatctgtaaaaatattgtcccgcaataaaaaacatggtataccccatgaaaaactgtagttccgagcgggccttaaatatgtacaccaactgtgcgcctttttcatacaggcttaaaacttctcctccgcataccagcacaaaggatatcaccagaaaatattccatgagaaatttttcttcacaaatttttcgtaagataggcacggccagatacagtccgcccagggcatagagaaaccagagatggaatcggcccgcaacaaactgtttgatcagccaccaggaatcctgggtattttcattgggaaagagccagtagtgcataaccaaaatataaaacagagaccagaatataaatgcagtaatgagcctcagaagattgtgggcaaaaagctttttcaaggtataaggtttgtccggattcagcaggaatactccggagatcataaataagatggggatacagatacggcagacactgtcataaatgttcatcacctgccattcataggaggtgggggaatacctgtgccattgggtagatgatacatgcacaacgataacaaaaaaaatacataggatgcgcaggatatcaaaatgcagcagcctgccatgggatttttttctgggtaagatttcttgcggttgcggtgacattcttttgcgctcctttcatttatgtgatttttattataacagattcttatggtacctgcatcgttttttggcagagcttgaggaaaaaatatgcattcagttgaaaagagtatttgtttggagtaatatgattatcaaactttagtcaaaaggagcatcatttatgagtatcaatatccgtgaatttgagacaaaagatcttccccaaataacacagatctggaatgaggttgtggaggatgctgtggcatttcctcagatggatccgctcagtgaaaaggaggcgcgatcctttttcgcaggtcagagctttaccggtgttgcggaagaggatggggagatcgtggggctttatattcttcacccaaataatgtgggccgctgcggccatctgtccaatgccagctatgcagtgaaaagctctgtaagaggcagacatgtgggggaacagctggtccgccattccctggaaaaaggtaaagagcttggctttcgggtgctgcagtttaatgctgtggtagcctccaatgcatcggctatccatctgtataaaaagcttggctttgtccgtctgggtacagtgcctggaggattccttatgaaggacggaagctatgaggatattattttgttctatcatacactgtaaaggaacggccggattgataaaagccagagttctatcataagtgaagagaggctgtctgaggaaatatcctcaggcagcttttttatgttataggaaagttctccgaacttgcctataacataaaaagccctccgggcgggatgcacactgcggcgtacaatgtagatgtcgcgaggcgatcgccgcaggcgcgagtttcgcaagcgaaactcttttcttgcatctggtgaggtcttatgcctggccggtgagaatggctgcgggaaatccaccttgatcaaaattatctccggcttctataagccagatcagggaaaaatcctccttggaggcagggagtacagccatatggagctgcgggaagccattaagggcggcattcaggtggtgtatcaggatttttccatatttcccaatttgacggtgtacgagaacattgccctgaacaccctggtggttaacagaagaaagcttgtaaagaaaagggaaatgaaggctgttgccacacaggcgctggataaaatcggcgccaagatcccgttaaatgccttagtgggctctctttccgtggcggacaagcagttggtggctatttcaagggcgatcttaaataatgccaagatcattattttcgatgaaccaacctcggcactgacaaataaagaggtgaaagagctgtttaaggtcatcgggagtcttaaagagcaggggatctctattttgtttgtgagccataagctggatgagatgtttgatatctgtgacaaggtgtgtgtactgagcaatgggaagaatgtgatcgaaggccccatgaaggattttgataagaagaagctggtttattatatgaccggaaaggaatacagcgatgcctgtcttgccaaggagccaaaggaggtacctccggttttgaaggtggaggggctgagcctggaggggcattttcaggatgtgagctttcaggtccggccgggagaggtgctgggaattacaggacttctgggtcctggccgtacagagctggccaaggctatttacggactgatgccagtgaccaaaggacggatgtatattgacggacaggaggtacatattaccagtcccatggcgggcctggccaatcatatcgcctatgttcccgaggacaggcttacggaggcgctttttatggaacagtccattaccagaaacatgatccttcagtccatacccaaggtgagccgtgcagggatctataagaaggaaaaggcaggagaggcgtccgccgcctgggtaaaaaggctgcgtatcaaaacggataatccggacaatctggtctccaccttatcaggaggaaaccagcagaaggtggtgctggccaaaaatcttatgacagatcccaagattcttatactgaactgtcccaccgtaggtgtggacattgggtcaaaaatggatatcagtcttttgattcaacaggcagccgctttgggcatggcggtgatcttgatctccgatgactccagcgagatacttacaaactgtaaacggtttcttatgataaaaaacggacggatccagcaggaatacaggagcgaggattttacggaaagctctttatattcccagctcatccgttaggaggcagacgatgaaaaaaataaaaaatgaaacggtcctccttcttgttatggttgtggttatggcagtgatcaccataaaaaatcctcagtttctcacagccaacaatatgatcgacatgctgcgaagcagtattacagacggaatctttgccatcggcaccatgatcgtgatgatatccggaggcattgacatttcctttccagccatcggggccttctgtatgtatgccactaccattctttttaatgccatggactatgagggaagcgttctgctgccgtttgtggcagcggctttgatggggatcggactgggggcctttaatgccttgttgatccacgtgtttaaaatacccaccttcattgccaccctgggcacctcgaacatcatctgtggaatcttgctcacctttatcggctccaatgccattatgaagcttccaaaaggctttaccagatttgccaagagcagtctgatcacggtgcctgctaaggtgggcagatcctcccttccttcggcggtcctgctccttgtgctgatcgccgtggcggcctatttgatcttgaatcataccatgctgggacggggggtatacgccgtgggcggcaatgtggtggctgccaggcgggtgggattccaggtgggactgatacagttgtttatctattgctttgcaggaggtgtggcgggaatctccgggcttacccacacctgcctggtgagaactgccaatccctttgatattattggaacagagctgaccatcattgcagccgtggtgctgggaggaactagtatcacagggggaaagggcaccatccgcggtacgcttctgggggtgtttatgatcaccatcatttccaactccctgatcatggtggggatttccacctattggcagagagccgtgctgggattgctgatcattatcagcgtgagcattgcggcctttcaaaataaggacaggccctcagggggcagagtaagaagggcgggtgagaaggtatggaaatgaccaaaggaaaaccaggggggattttaaaggcctttgataaaaccacctggaagctgctgtccattatctgtgtagttgccttgatcatgggaatccgtcttccaggagtgttcttctcccccacgaactttaagtccatgctttttcaaataccggagtttggcctgttcgcccttgccatgtccctggctatgctcacagggggctgtgatctgtccattgtcagtgtgggaaatctcacggctatagtcctgggaagctttcttcaccgattttaccagccgcagatgacttcttttcaggagggaatgctgctgggcgcagcagcggtgctggctttggtgattgggtgcgccgcaggcctggtgaacggttttttgatatcagtcattggagttcctcctattttggccactcttggaaccatgtctttttatggagggattgggattgtcattaccaagggctctgccctttatgattttccggcgggactgaaaaggattgggaacggatattttgcaggggtggttcctgtaccagccattatttttctctttgcggtccttggggtttattttattattcagaaatccaattttggacttaagctgtacatgctgggcaccaacgagaaggcctttgcctattccgggctgaacagaaccaggatgaccatgggctcttattgtgtcagcggagtattggccgctgtggcgggttttattattctggcccggaccaatactgccaatgcagattacgggagcacctatattatgcagagtattctggtgtgtgtcctgggcggggtgaatcccaagggcggatccggtaaggttacggggatcgtgctggcagccgtcaccattcagatgctgtccagcggattaaacattatgaacgtaaacagctattttaagcaatttgtatatggagcgctattaattattatgatcatttcaaattcctggtctgaaatcaggagaagcaggtaggagggcacattatgagtaagaaagcaaaggcagtattcggcaatcatcccttcacgcaggaggagaaaagagagcctatttatatggatggcactaatattgggcaatttgtctatccggattttggcatggattacagcgatttaaattatatgtactatagctcccagcatttgactgtgtacagcatggagattgggccgggaggctttttcaatcccccggactatcatcccggggacgaggcgtattttgtgttggaggggaccattacccagtttaatccagctacaggagcctgcattgaggtgaaggagggggaggctcttctgattcccaaggaaacccttcattctgcctacaattttggagagaagaccgtgaaggtactggcagtgatcgctcccaagattgtggaggaccaggagtttcccacagatgtgaatgggcctaagaagatctggggctattccaccaaggattttccagaaaagacccaagcctgggatatgccctgcagatatgggtcagtggaccagttaggccagtggccggagccgggggagctgcttcgggagaaaaaaatcatttatcatatcacagaggagaagaagctgaaggtgatcaacggggacaccaggcccattcttatgaaatactctgtgagcaatgattttatggatatgggagaatacatcgttcctgcgggaggtgtggtcaccaggcattccgaggttatccgccatgagggggaggccttccttctggggctggagggacctgtggcagtatacctgacggacaccagggaaacctatatgctgaagcattacgaaggattatatcttcccccatgtaccaactatatgctgctcaattacagtgcggtcacaggcagggtgatctttgcagtggcggcacagccacgggctgaataggaaggggaagagctgcccctgggattgtaacagatagaaggaaaaaagccataaacgagagggcctatgagaaataaagaaattgcagaaatcttgaaaatcacaccagcggcagtatccatggccctgaataataaaggcggcgtcagtgaggccaccaaaaagaagatcatggagctgaaatatgccagctcctcatcagaaaaggaaaaggccaagaaaaagggaagtatcttgttttccattcataaaagaaatggaaatgtaatatcagagacccattttttcgtgtctttaatgtccgcgatccaggagcaggcggataagtatggctattatgtaaatattattcattatgatcccaaggtggctttccaggagtttatcacccatattgacctgacggatataaaagggatccttgtgcttgccacagagatgtcctcccaggatgcggcgctgtataaggtgcttgggaagcctttggtgatcattgacaattggtttgaaggagaagactatgactgcgttctcatggacaatgtggacggaattaagcaggctgtgcgccatgcttatgagatggggcatcggaaaattggatttgtgagaagcaagacggatctgtataatttcaatgagagatttgagggtttccgccagggaatgcgggctctggggcttcccatttataagaaattcattttctatacaaagtgcacaagcgacggggcctatgaagacatgaaggaaattatccgcacagtgaaggtgctgccgtctctgctcatcatatccaatgatgttatggctattggggtgatgaatgctttaaaatatgcccagtatcatgtgcctaaggatatctcagtcatcagctttgacaacatgcccattgcaaaatattttacgcctgccattacttcagtgaacatccaaaatgaaagaatcggccatgtggctgtggaccgtcttgtggagaaaatggaaaaagggctcacggattatttcgttcacagtcttattggggtaaatctggttatcagagaaagtgtgtatgattttacaaaagaatgttgacgaatttcaacataggggagcagtgactcatatgagtcgctgctcccccatgaacttttgtatgaaagaggttagaatctgagattcaccgatggttgtcattctccaagaaatctatgtatttcttctgcccgtttctttgccatttcatacccctgtctgtagaaggcctgcagatgttccgggttgttgtctgttcttcctgccaggacctttaaggggcgtatgagcaggatctttccctgggactccagcttttccagggctttcagggtattgttataccgggcggcgcgctcctccagcctgcggatcagcccgggatatttcccatacaccctccgtgcagccacactggttgttttggagggctttttcaaataatccttatctctggtaaggatcacgatgttcttcttgtagcctctttccagtgcccggcgcagggggatggggtccgcgatccctccgtccagataaggcattccgtccagcttcaccatgggacacacaaagggcaggctgctgcttgcccttgcgatattcataagccggcggccatccttgtcctctgtgaaatattctgcctctccgctgacacagttggtcaccacgaactcacaggttacaggtgaggaaaaataggcatcataattaaaaggaaccagtctgttgggatattcctcaaataccatatccaaattcacaatggtcttcttggaccttaaatgccgccaatgaatggggggaatatttctctcacctgggataaagcattctttggtccgccccggctgtctggcagcgtagtccatagcgttgcacgtacctacggatactgctgccacatagggcagataaatgttactttcctgaaaataatctaggacaccggaggtaaaaatccctctgttggcgccgccttctaaaatcaatccaaccttttgcatatgtagatcctttcttccattctatatgttttcgttcctatacagccatgccgaaccgcttcagcacacggcagatcccttcacagatctcctcctgtacaggaggcattttcataaaatagtcacagcgcagtcgataagcatgcagggagaaatcaagatcactgcaccagatcagtgcgcattctggccaaagagaacggatatgttctgcctcattcagcccggttattccactcagggcaagaatcacgccctttggtttttgaatgagcagagaagtatagaactcttcacaactattataggactctgctttgagaatgactccattctgggcacagcagtcttctgcccagttcgctatgcgttttcccatgttcaaatcatcggtcaatacggcaatccacttcatacctgcacttcctcctggtcctggtcttatgaccattataaggattcagacgtgttttacaataaaagtgtcacgaatggtaaaaaagtgtcacgaatggtatggccgaaggcatttttattggaagattatatgttataatattcttaatacttactaggaggagacggctatgcgtatcgctctcgttgatgatgttgcttcccagcggcagggccttcataaacagatcaaggctctgttgatccgttattgcctggaagcagaaatttttgaatttgataatggggaaaaattcttgtctgcggcaagaaaggaagccttttcccttgtttttctggatatttatatggaggggaaggatggggtggaaactgccagggagctgcggacctttgacggggactgcatcctggtatttaccaccacttccacagaccatgctctggacggttttcgggtcaaggctctgcagtatctggtcaagccctattcggacaaggctttgggggaagtgtttgaagagatgttaaaacgtctgcccaccccggaaaagtacatcgaagtgcgtatttcccgtgaaatgacaaggatacgcttaaaggacctgatctatgcagagcactaccagcatcaaatctacatttatacgaccgagggaacgctggtaactgcacggatgaattttaaagacttttttgtgcttctctctgaagagagacattttttcctgtgcagcagaggtgttgtggtgaatctggactatgtggacgactatgacggcagtgaatttctcttaaaagatggcaggcggctggcagtgagccggaagttttcccaggaagcccgtaaggcatttggggattatctctttcatggaggacgaagtttatgaaacaaatgttaagcccaatgattgaaatggccatattgtttcctggcgctgtgttggcctatcttccaatgaaggataagctgcgtttttcccttgccagacttcttgccacggggattccctgtattttggggatatgtatcctgggaggagccataagcagccattttgagatcgctgtgcgttggatcatgatcccggcagcagtattggccgttacatactaccacttcagtctgaatcttcctatttggaaatcggggagtgtggccttggctatatgcagtgtgttttcctgcctcagcggagtggccaggtccattgatgcctttatctacacggattattctcttttgtggctgtccattcctgcgggattggcatttaatctgatgtgctggatttttgtggcctttgccgcctatccagctacccatggagtggctgatcttctggatgatgaatatattgcagggacatggtatatattctgggttctccctgcgctgttcattgggatctgcttctatattattcctgtgcacacggagattttgtatatggggcggatgatgaagatctatattgtaataagcctggtgctccttgcacttttgtcggtgttttatctgcttttttatcttatggcaaagaacttgaataagcttgataccttgcgtcaggaaaaccagtttctccatatgcaggagaaccagtgggacaatctgaaatctaccatcggggagacaaaaagggcaaggcatgacatgcgccaccatttaaatgcacttcgggcccttgtggaacgccaggagtgggaaaaggcaggggagtatctggcctctgtacaggaaagcattcctgttgcggagctgaatctttgtgaaaaccctacggtggacagcgtggcaagccactatgcatacctgagcagggaggcagacattccatttactgcacttctcgacctgcctttgcagctcccggttgcggaaatagatttctgtgtggttttgtccaatcttctggaaaatgcactggaggcaagtaagcatacacaggactccaggcgttttatccgggtggaggcgaagcttcattccagccgtgtgatccttctgtctgtgaaaaatgcttatgatggcattatcaaagaaaaggacggggtgttccagtccacgaagtccagacgccggggggctgggatcggactgaaatctgtgcgccacattgtggagaagagcggcggatattgtaagttccagtatgaggatggggagttttgggcggatattatgctgagggggaatgattaaaggaacatttggagatatacaggatacggtcaaggtgtaaacagaggggagctatcatatagatagtttaaataaagggcagtgtgatgcagatcacactgccctttatacataacgtgacaatcgtgtgctcaattctccagcgggatcttcttacaggtattgccctggataaactgggtcttcaggacctcgctgacggtttcctcgggagggtttaccaccagatcgaacaaacgcttggcgatgaggggaatgtcctgctttatggtggtgatgggaggataatgaagaccatctaagatgttgtcaaagccgatcaacgacaaatcatcgggaatgcgcaggcccagaagatttgcctcattgatgattcccagggcgatcatgtcattggcacagatcacggctgtgggtggtgcgaagagggagagaaaatggcgcagagcgttttttcccacctccatgttgggcagcttgccgctgcaataggtgtactctttttgaaagggcaggcccttggaggccagagccttgcagtagccgtcatatcgttcctgaaaggtgagaaaagccagatcaatgcctgcaaaggcaatccttcggtggttcagattgtataaataatccacggctgtctggatgctttggatgttttcagaacggacggtggaaaaatctgatgaaatctttctgtccagtgaaatcagcgggattccgatatcatgcttgcagaaaatagaggaatctataccttccgttaatatgatgccagagcatctgttagaaatacagtaggtgagatagtccttttcaatttctgcattgttctctgtatcacagataagcagtgtatattttctctccagacaaatccgatttaggtgtttgatcagggaaataaaaaacggattttccatatcataaatgaagatagcaatggagtttgaggttttggaaaagatgtttttgatggcctgattggggatgtagtggtattcgtctattaccttctgcaccttggcccggaccttttcggaggtggcagagggattgttgatgactctggagacggtagcggtggatactcctgcaatttccgcaatttctcgtattcctatataattattttttctatttttctgtttctccatagttatttcctctctgtattccctgacggcagcataggtataccgtgctcatcgtcataattatagagttcttccgaagaaaagtaaatacacaacttagataaaacaaaatataaatgtaacacgttacatttgcaaactggtaaccacatccttgcctttggaacttatctacaaaaccacaagcataatttgatgaataatgtagaaaatgtataattgtattgactataaatcaaaaagatggtaagattcaaaatgtaacaagttacaaattcaagaggcattttacatacatacaaaaaataggaggaaaagatatgaaccagagaattcaaaggctgagaaaccgattgtttgatacaaatcccaggatctgtccccagcgctgtgtgatttttacggaatccatgaagaaatctgagggacgccctattgcacttagaagagctcaggcattttatgatgtattaacacagatgacggtctatgtaaatcaagacgaactgatcgtgggaaatcaggcccagtggcctaaggcctcccctatttacccagagtactccacagactggctggagcaggaactgaagcatggaaatccatattttccagacaaacgccccggagataaattctattattcccaggaggactgtgacaagatcctggactgcgtgaagtattggaagggaaaatctctttacgaaaatctgaggaaaacacttccagataagatcaatcaggcctgggatgccaatatcattgatgatacctgggtatctgcagcaggtcttggaaatgaagtggtggactatgatctggtggtgaaaaagggtttgaaggatgtgatggagcgtataaaaaaacgtctggatgagcttgacccaaaagagccgggaaatacccggaagatttggttccttcaggcagctcttcaggaaaatcaagccgttgtggaattctcaggccgccttgcacaggaatgtgagcggcaggcaaagaatacccagggcagcagggctaaggagctggaaaagctggcagagatctgcagaaatgtaccattaaatcctgcccgtaccttccatgaggcagtgcagtccatttatatgatcctgctggctgtacatctggagtccaacggacatgccatttccctggggcgttttgaccagtatgtatatcccttgtataagaaagacctggaagaggggcgaatcaccagagaagaagcactggagatcgtggaagcctttttcgtgaaatgtaatgagctgaataagctgagaagctggccggatacagagtttttcctgggctatcagatgttcatcaacctggctgtaggaggccagacggtggatggacaggacgcagtaaatgatgtatcagagctttgcgtggaggcctgtgaggatgtaagactctttaccccctccgtatccattaaatggtttgagaagaccagtgataaatttatgatgaaggccttaaatgccatggaaaagcataagggcggccagccagccttctacaatgacaaggcatttatgcgcaccttggaaaatatggggattgctcctgaagaccggtgcaactgggtgcccgatggctgtatcgaggcttccattccgggaaaatgggattttgccgcaaaaggcccctggctcagtgtggaaaaggtgctggaggtagtattaaacaatggaacggatcccaagactgggtatcatttctttgaccaggagaaacgaattgaggaagcgcagagcacagaggaaatctttgagctgtataaaaaagcccttcgctatttcattgatctccaggtagagacagagcatattaacgatgagatccatattcagcaggatatcaatgccttccgtgcttccctggtggaggactgtattggaagaggaatggatctggtggagggcggttcggtgtattcggcagacggaggtcccaccgcgggaaccatatgtgcaggggatgctctggcagctatagaagaggtggttttccagaagaaaatcctcaccatggaacagcttcttcacgcattggctaccaattatgaggacacaacaacccttccttccggaccagagatccgggcaattttgaaaaataaaacacccaagttcggcaatgatgaccagtgtgcggacaaatgggtggtggcagtggaggattttattggctccacctatcgctatgagtgtaagagctccaagtatggcaagggaccgatcccctgctgcttctcctacagccagagtccggtaaccggcaacattgcttttgggaaaaatattggcgccacaccggatggaagaaaggacggggagcctgtgaacaacggaatctcacctgccaatggttcggagaaaagcggtgctacggcagcctgcaattctgttatgaagcttcccagcatctggttccagaagggggccatcttcaatatgcggctcaccaagtccgctttggagacagaggaaaacaagaaaaagataattgacatgatcaaggttctgttcatgaattatggacagcagattcagtttaatgtggtggacaatgaggtataccaggcggcaatgaaggatccagagtcctacaaggatctcatggtccgggtgtccggctatagcgcactgtttacctccctgtctcctgcctgccagatggatgtcatcagccgcacagagctggagctgtagaagaggatttcgaaagaggaaaaagcaggcagaggtgatttatggggaaatgtacagtttttaatatagaacgttatgccactgaggacgggcatgggatccggaccgtggtatttctcaagggctgccggctgcgatgcagatggtgcgccaatcccgaatcccaggaatttgctccgcagattctgttgaatgtgaatacttgcatcaactgtgggaaatgtgcagccatctgtccctcccaggccatttccatgaaggagccatggggatatatcacagatccttcccggtgcgctctgtgtaatacttgtgtggatcagtgttttcaagatgccaggagacggatgggaaagatttatacagatgaagagttgtttgaagagatacgaaaggatgaggcgtactttcaaatgtcgcatggaggggtcaccttcagcggcggagaacctctcttttatccggaaaccgtctgtaagattagtaagtggatgagggagcggggcggagataccctggtagagacctgcggtgaagtacccctgtccaacttgaagaagatagcggacacggtggaatctatttattttgacattaagcagatggatcctgagaagcacaggcagcttacagggcgggataaccaacggattcttcaaaatctggaatggctctgtgaaaattacaggggaaggctgtctgtgagatatccttttattccaggctgtaatgacaaggagggggatttaagagcgtttttccaatatataaaggacaaaaagaatgtttcagagattgtgtttctgccctatcatcgactgggacttcccaaatatcagggattgggcagagattatctcatgggtgatggaaaatctttgaagaaaaatcagctggattttgtggctgatctaggcgctgaatatggactacgggtgcgtattcaatagaaataaagaaggggagaggcaaacgtatggggaaaaagaacatgattgcttttgactgtggaaattcttccttccgggtggtattgggaaggcttgaggaggaacggctggaaaccacagtcattgaacagatacccaatgaaaccgtgtacacctcagggtacttttattgggacattctgaggatttatcaaagacttctgaaggctttaaaaaaagcagtaaagcaagggcctgttgattccattggtatctgtacctggggagtggattttgcattatttaccaaggagggctttatgctccagaatcctctgtcctaccgaaattccttgggagaagaagtcatggaaaggctggatgaggagaagcggagggaattgtttgaagaaacgggaattctctgtgacaagatcaattccgcctataccctcaaagggcttctggaaaagcatcccggtctgaaagcaggggcagcgaaagttctgatgatcccggatattcttaattatttttttacaggggttatggtgaatgagcccagtgagctgtccaccacacagctgatggatgccaggtcgcagaaggtaagccaaagggcctgtgagcttatgggcatatctccggagctgttttgcaccatgggagagcatggaaagaagattggctgtcttcttccggagatcaaggaatatctggaaattgattatgatataccagtgatctgtgtaccgtctcatgacacagcctctgccgtgctggcggttccggccagagagaaggattttgcctatatcagctccggtacctgggcactgatcggaatggaactggatcagcctttgatcacctctcaggttcgtgagcgttgtcttacaaatgaagtaggcgcttttggaaagattacactactgaaaaataatgcaggaatgttccttgtacagcgtctcaaggaagaatatgaggagcaggccgggcctgtggattgggaagaactaaatgccctgggtgatacctttactggtgaagtgcctctttttgatgtaaatcatcccagattttttaatcccagaagtatgagcagagaaatctggagcttctttctagaaagcggacagatgaagggagagcttcagtggaacgccattatacgcagcttccaggtatccatggcctgcagttacggccaggtgctcaactctctgaagaagatcagcggcaggagcatcgaggctgtgtatattgtgggagggggttcccagaatgtgcggctgtgccagctggcggcagatatctgcaggcagaggattatcacagggggaaaggaaagtacttctgtgggaaatatagcagcccagctaaaatatttttatccggagagatccattgaggagctgcgtggtcttctctataacagtgtggagcagaaggtgtatgagcccatggattttcccaaggaggtatttgagcggtatgaaaagctatcccactagaaggcaggtgtacagatgagtgagtatatacttgaaatgaaaaatatccaaaaaagtttttttggagtaaaggtcctggacaatgcccagctgcaggtgcggccgggtgaggtacatatcctgctgggggaaaacggagctggaaaatccactttgatcaagattctttcaggggcatatggacgggagggaggacagatttttctccagggcaaggagcttcctcccatgacgcccaagcaggcgctggatgcagggatcagcgtgatctatcaggagtttaatctggtaccctatctgcctgtgtatgagaacatttttcttggtaaggagtatagccggggaatcatggtggacatgaaaaaagccgcagatgaggcgaaaaagtacatggaccgtgtgggtctgaatgtaagccccaaaactctggtgagcaagctcagtgtggcccagaagcagcttgtggagattgctaaggccatctccaatgacgttaaggttctggttcttgatgagcctacagctgccattacagacaaagagactcagatgctttttggcatcatccgggagctccagaaagagggaattggtattatctatatttctcatcgaatgagtgaattcttcgagattggggaccgatgtaccgttatgcgtgacggaggttatgtggggactgtgaatgtggcagagactaccgaggatgagcttacccgcatgatggtgggccgttctgtaagctttgataaaatcgagaatttacatgtgaaaccggaggaggtggtactggaggtgaaggacctgtgctaccgggatttactgaaaaatgtaagcttccagcttcacaggggagaaattttgggttttgcgggacttgtgggggcaggaaggacggagacagccaaatgtattattggggaatataaaaaagacagcggtgagattgtttacagaggagaggttctgtcaggagatctagccaagaatattgagaaaggtatcgtgtatttaagcgaggaccggaaggatgagggtctggtgctgatgcattcagttatggataacattaccctgcctaatttgaagaagctggccaggccttttctgaacaagaaagaagcccagagtaatgcactgaagtatattaaggatttacgtgtgaaaacacattctcatttgacagaggccaagaatttatccgggggaaaccagcagaaggtggttattgccaaatggctgtgttcagaagctgatatttatatttttgatgagcctacccggggaattgatgtgggagccagagatgaaatttataatatcatgtattccctccttgagcgtggcgcatccatcattatgatctcctctgacctggtagaggtactgaaaatgtgtgaccgggtggtggtcatgaaggacggagagatcagcggtattttggataatgacttggagctgtcgcaggaaaaagttctgaagtatgcattacagaagggagaataatatgggttcagaagcaaagaccaaaagaaaactagatatatcagcagttacactttacctgggggtaattgctattttcctggtatttactgttatttgtcagatgatggggaagaccttcctgaccattaacaatatttttaatattatcacccaggcaagtattaactctattattgccattggcgcatccttagttatccttactgggggcattgacttaagcgtaggttccatcgtgggatttgtggggattttcggaggtcttttgatcaaaggcggaacctctgtgtggcttgcatgcattgcctgtattctggcgggcgcagttttcggtatgattaatggcgcgctggtgagttatggaaaggtacctgcatttattgccaccttgggaagcatgcagatcgccagggggcttgctctccttattaacggaggacagccggtatcaagctttccccaggctttgggaatgatcatgggggtaaaggtttttggagggattcccatctcagttatttatgtatttgtattttacggaattatcatttttgtcatgggctacaccaagtttggacggcgggtctattccatcggaggaaatatcaatgctgccagattgtcgggaatccgcgtaaagcgggtagagatgtccgtttatattctaagtggcattttcgctgctattggcgggattatgcttctgtccagactcacctatgcagatcccaacgccggaagcggatacgagatgaatgccattgcctccacggttattggcgggatctctctttccggggggaagggaaggattggcaataccctggtgggcgccattatattgagcaccctcacctgcggcctgcagatcatgaatgtggctacctattatcagaccattatcacgggtattgtgatcatcatcgctgtctttgcagacaaacagaaggagcgcaagggcgaataacacagggcaatactgcgaaagcagacattatataatccaaagggaggtatttacaatgaagaatcaaaagattacaaagatgctggcagtttctattggtgcagcgatgctgatatcagcaggcaccaccgtatgggcagaggagggaaaggattattcagacaagaccattggttttgtgggtatgaccatgaataatgagtatcaccttaccctggccaacggagccattgtagagggtgagaaaatgggcgtagaggtggaggcacaggccggagatcagcatgccagcgcagatgcccagctgggaattattgaaaacatgatcgccaataaggttgacgggatcttacttgtacccagctcttccgatggtttggaatctgctttaaagaaatgtaaggaagctgatatccccattatcaacctggatacaaagctgacagaggaaagtctggagaatgtgggaatggatattcccttctatggaacagacaattatgaaggcgctaagctggcaggacagtatgtggcagagaattttgaaaaaggtaccaagacagctattttaaagggaattgaaggccagacaaatgcagcggacaggtataatggatttatcgagggagcaggggataccattgaggtggtggcagagcagacagccaactgggaggtagaccagggttatactgcggctcagaatattatcagtgccaacccggacgttcagttgttcttctgctgtaatgacaacatgggcattggtgcccttcaggcaattaaagctgctggaaaacaggatgatattcagattatcggctttgacgcagtgagcgaggcgttgaatctggtggagagcggtgaatttctggcaacggttgcccagtatcccgcagagatgggtaagctgggtgtggataacatgctgaagatttttgacggcgaggagccggagagctatattgatactggcacaaaggtgatcttaaaggacaatgtggcagagtttaaggaatatctggaagagtaccagggagaggcagaagaatgaactataaaaaattgatcgtagaaagtggaataagaatggagggctccggcctgactgtggagacatggggaaacatcagtgtgagagaccctgaaaccaatttggtgtaccttacccccagtgcgatgaaatataataccatcacagaggaggatgttgtggtgtgcagcctggacggccaggtggtggagggcagcagaaagcctactatcgagacggaaatgcatttgtccatcttcagaaaccgtccggaggtgaatgcggtgattcacacccatcctttatattccatgatttattcctgtcagggaaaggatatccccatgatcattgacgaggcagcccagaccctgggagatgtgtgccatactacttcctacgctctgccaggctcattagagctggcccaggaatgcgtgaaggcacttggaaaggaggccaattcttgtctcctgcattcccatggggcggtgtgcgtaggtgcagatatggatgcagccttcaaggttgccacggtcctggaagtgacggcccagatctattacatgatcgaagcaacaggaggaagcccggtcgtcttatcccagagtaatgttgcagcaatgaaggatttcgtgaaaaatcattacgggcagggaaaataataaatattacttaatacatatcaaatagttcaatgagggacaaaagaaatgcggggatgcctttaaggcgccccgcattgaaatttagtcataggtagtcccttcttttacatattcaccaactgttcatatgttcatagagtccctcctttgggaatggtgagaatagcaatggtgccttttccaggggtgctgtctatggttaatgttccgctggaaaggacggccagccgccggcgtacgtttccgataccaatgtgagatctgtcatccacagcgtgcttcttgggagcaacacaggaatcaaacccgatgccgtcatcctgcacgatcacctgccatttgtctaaggtttccactgtgcggagagtcacggtcacgcctgtctcccgggccataacgccatggcgcactgcgttttccactatgggctggagcgtcagggccggcagctggaagtcggtgcaggtgatatcatagataacccggaggctggcaccgaaccgacgttgttccaatgccagataacactgcacgtgggacagttcctgggtaaagggaatgggtgttttctgggttaaggaatccatgttgccccgcagaaactgcgaaaattcactgacagcctcctctgcctgaaccgggtccactcggcagagctgtcggatggctgtgagaacgttgtataaaaagtgagggtggatctggctgagcatgatatccatgcggctttccgagagctctttctccttctgctccagccgaagggtttgttctgactggatgttaagaaagatcattaggatggacacagtggtagcaggataggtgagggccaggccatattcgtgtccctggattatcaccgctcccagaggaaggatgttatagcccaggaaaaaagccacgtcccttcgccgcaatacaaaacggtagcgtatgacagtgacagcggtgatggccagcgttacaatggcgatcagctgagagagccaccaccagctgccacggtggtaaaagttttcactgtctataaaataatacatcccgttccatagatttaggatcacgaaaaaagtcccaaatataccaagagccacaacacttgctaaaattccccggtgcacccgcacgttggtggtgaggtaggtgatcacatagcaggcataggacagcggcaatgcgacacctccaaggtactgtatcaaacagcccgcccacatggctgccatctgccagggaaccgtggagccaaggcagagccaagacgggatgtctcccagcagcatggcaagattggaaatacaaatgagtgcgaaggatcggttcagccgctttttccaattggaagggagcagcagatagaccaacaacgtcaatataataacagcgccgaatatatctaaggtgacattgacaggaatatatatcatatttgaatctcttctttcggtaatgcactgggcattccccttttttacttaacagtaaaaagagcaatgcttcttgcttttatagtaaaggtctggtctgtgcaatccaaaatgtggcaggtcttcaggatgctgttctcttctcctgtatttaggcacaggctccagcggtggcctggcggaagcttgggcagggtgaagacagcgtcctcccagtacacattcattgctacataaacacagtcttcccgctggtcttcgggaatccagcctgagaacataactcccatgtatttggtgtcctgggaaatctgtgaatcccagggctgctctttgtggaagctgatctccggaaatcccagggaagaagccttgagctttcccttgatggccggatgcttttttctaaagcggatcatatatttgaaaaattcaaatatatcctgattggttttaagcttggaccagtccagccaggagatctcattgtcctgacaataaggattgttgttgccaaagcgggtgtctgcgaattcatccccggacagaaacataggtgtaccacggctgcacataaggactgcgcaggcgtttttcataagccttcggcgaagggtgaatacttcaggattctcagttggtccctcctccccgcagttccagcttcggttgtcattggaaccgtcggtattctcccagccattgtcccaattgtgtttctcgttgtaagaatacaggtcatagagagaaaaaccgtcatggcaggtgaggaaattaatggaggaattgtagccctggtactggctggcatacagatccatggaacctgccatgcgtttagcggcttccggtgcaaaccaatagtcgccctttaaatagcttctcatgtcatctctgtatttgccgttccattctgcccagcggttccaggcaggaaaactgcccacctgataaagtccgcctgcatcccaggcctctgcaataagcttcacattcctgagaatggggtcctctgccagatttttcaaaagcgggggctgattcatgggggagccgtcttcgttccgccccagaatgctggcaaggtcaaagcggaaaccgtcgatccggtaagtaattacccagtagcgcagacattccaggatcatctgctggacaatgggatgattacagttcagggtattgccgcagccgctgaaattataatatttcccttcaggggtgagcatataatagatattgttgtcaaagcctttaaaggagaagaaagggccttcctcattgccttctgcggtatggttgaataccacgtccaggatcacttcaattccgttctcatttaattccttaaccagagactttaattcattcccctcccggttatattccacactggctgcatagctggtatttggtgcaaaaaagctcacggtattgtatccccagtaatccagaagggttcggccgttcacctggcgttttccctgggtctcgtcgaactcgaagatgggcatcagctccacagcagtgatccccagctccttgaggtaggggattttttccttaagtcctgcaaaggtgccgggatgcttcacgttggaggaaggatccatggtaaaaccccggacgtggagctcatagataatggagtcctccatggcggccagaggctgtttggcattgccccagtcaaagttattaaccaccacccgggcccggtagccaagaaggtcgttggggttggaggcccaggcactctgtcctgtcactgccttggcatagggatccagcaggggcttatttttatcaaagatcaggcccttctccggttcataggggccatccagccggtaagcatattcaaactcggtaatatccaggccgaaaacgatcatggaatacacactgccgatccggtaattttccggaaagggcagtatggcgaagggctctgcctcccctctcccaaacagcaaaagctcacaggatacagcattctgggagtgaatggtaaaattcactccgttggacagggcagtggccccgttgatctcataaaatcctggtcttacatcaaaaccctgaattttgtctatgggcactaattggtttacgcggtctgcaaacagctcatcctttggcttttccatatattcctcccttaagataaaaaaatcatgtttttgacagtgtcacattccctttttcacaaccttgtggaaggtaagatagaatacaatccccttcacaatggacgaaatggtcagggcccaccagatcccggtcagacccagggcagtattgctcagcaccagggccagaggaatccgggagccagtaagaagaatactgatcacgctgcacaaggtggtctttcccaaaccggacaaagcgcctatggtggtaagctccacacagaggaagccttccccgatgccgatgatgatcaaatacccaacagcgattttgatcacatccggttcatggaagaacagccgggccagctgattgggaaaaaggacaaacaccaaagttaccaatatgccccacacggtaatggtgcgcacagacagggaatagcccttcttcacccggtccatttttccggccccataattttgtcccacaaaggcattcagggctgcggcaaaaccgtctgctgtattccaggagatggattcgatctgtccgcccactctctgggtggccactgcaccggggccgaaggcggccaccatgcgggtgaggaacatggagatcatacaatagatggtaccctgaagggctgtgggaaccccgattttgcagatgctgcgaaaatactggagggggatgcgttccaggaagcttccttccttcagcacattgccctcctggctttttcctgtcaggctcaagagcatgaacatcataaccaggaactgggcggtgactgtggcaatggcagccccgcatacctccagccttggaaagggccccacgcccaatatgagcaggggatccaggaccatattggtcacaagacccaccagattggccttaaatggcgtcttggagtctccctgggctgtgaaaagccctgtcagtgtaaaatttaaaaaggaaaaaatgatcagtccgcaggtgatcttcatataaattctggcgtggcggaaggtctccgggtcattaagctggaagaaatttaccagttgatcagtaaacaccaggcacaagactgcaaaaagcactccaaacagtacggtgagctgcagggcgcccagggcatatttcctggctctgtctttatctccgccgccgcaggcctgggcaacgtttacctgtcctcccattctggccagtgacaccagtccctgggagagccatacatacatgcctcccacgcccacgccggctacggccttggagcccagcattccgatccaggccatgtctgtgatgttgtaagcggtccccagaaaggaggaggccataataggcagggacagctctgccagggattttaaaataggtccctgggtcaaattgatctgtttttcttttttcatgtttattccaccgattcctgtatattactcagtccatcataagcttttccacaaaatttagcaatatttttatgcgacgattgtgtggggctgtgtccggtgacagcagtgactcctttcctgtgacagatagaatttttggcatttacccttgaacaatttggtgctataatttactgaacggttagggggacacgcagggttcccctaaaattcagaaaacaattaattgacagaggtgatgaattgaaaaacaaacaaaatctaacacaaggggctcctgcccggaccctgttttttttcgcccttcctatggtcttggggaatcttttccagcagttttataacatggcggactccatcattgtaggaaaatttgtgggagaagatgccctggcggcggtgggggcctcctattcctttaccaccgttttcattatggtggccattggcggcggactgggagcctctgtgctcaccagccagtatctgggggctggaaagatcaaggaaatgaagacctctgtgtacaccttcctggttaccttcggggtgatcagtgtgatcttggcggcgctggggcttctatgcaactcttgggtgctgagcgccttaaaaaccccagaaaatattatggatcaggcgttgctgtatctgcagatttattttctggggcttccgtttatgtttatgtataatattctatctgcggattttaatgctctgggaaaatcccagatacccctggcattgctattgttctcctcagtactgaatatcggcctggatctgtggatggtgtgtgttctgcatatgggcgtggcaggggtggccattgccacggtcatcgcccagggggtgtctgcggtgatctcctttgtgatcctcatgaaattcctggggagctacaccagcaaagacaaggcaagggtatttgataaaggaatgtttgtcaccgggaccaagatcgctgtaccttccattatccagcagtccattgtgagcattggaatgcttctcacccagtctgcggtgaaccggttcggctcctccgcccttgctggctattctgcaggaaccaggctggaatccatcggcattgtgcccatgatcgccgtgggaaattccatgtctccttttacagcccagaacctgggagcgggaaagacagagcgtgtcaagcagggctacaaggcagcctatgggatcatccttgcatttggagttgtgcttatcgtgctctcccagttgttctataagcccatactcacggcctttgtggatcctcttcagtcccctgtggcttttgagactggaacagcctatttccgttttgtgggactgtttttctccatccttggctttaaggccattacagacggcatcctgcggggctccggggatgtaaatgtgtatatgctggccaatctggtgaatctggggatccgggtggcggttgcccagctgggttcgcccatttttggcatccaggtgatctggtatgcggttcccatgggctggctggccaactatctgatctccttcggctggtaccgtaccgggaactggaagaaaaagcacctgctctaggatcatgtatcagtttttggcagcctggtagaattctcttagctcagctttcttgtcttcggaaagctgagtttttttaattccttgtatggctccttcaagagccaggaggcggtttatgcaggcggattcatcaatctccttgatcttcagccaggcctgcttgctgcccatttcttttaattgttcataggtggtgatccccacctggtttaattgctcctctacagttttgccaatgttgggaagcttggataattcacccattgtattctcctttccagaaaatagggcggttccctgggccgcatacggccgggagctgccggattcagagacaggggcattatctgcccctgtgtttctcctttttcttctgctgttttaattgaaacctgcgttcctgttctgcctctttttgttctttagaggctgtctttcttactgttttggattgttcctgctgcagcttaagggcctgctgggatctggtccctgtggtcattgtttccaactgtttcctgatctggcgctgtacccttttcggactgcatttctgctcccgctcaatggccgcaaccgggggactaaagcgtaaccgatgatagtttctcaatagaaaatcctgaatttcataatcctttggctcagggccgaaggtgactttgcacacggacagtttgttgtcccatgtgcgttcaaagataccgatccagaagggctcctgaaaaaatacctgcaaggttactgtagctttgtccataatcgttcctccttaaaagaataaaatgaacaaagaacggacgaccaaggaggagggttactgacagcgttgttataaatatctgccgctgcgcccggactacctaccggggctgtgtttttatctttgctttttaattttaccatagtatctcaaagcttttcaattggtttctgcgcataacttggccatatagaaaaataacaagatcaggatatatttaatataaaatcaaacacaataggttctttttattgatttttaacacctaatttcgtataataaatatagaaggaggtgttattatggcacaagcaactttcagcgtccgtatggatgaaaaattaaaacgacaatttgatgccctatgtgcagattttggcatgaatgcaaccacagcttttaacatatttgcacgtgccgttgtccgtgaaagaaaaatcccatttgaaattcgggcggctgaggaggtgagtaaagctgcaggaatgcaggcttttatggagttaagggctgaggcaaaacaaaacgggattcaggaactgtccttggaggaaataaatgaagaaatcagaaaagtacgccaaggggaggccgattaaaacattttccaaacaagagattcattattaccgctagagagtttttggatattataaaataaaagccgtggataccccagcgttagtctggggtatccacggctttagaagattcctgttatgtttcctgttcttcaagcatatttttttgctgaatgagcatttcccgaatgcggttctgggtgtagagccctgggtgttttttgtcttccttgtccagctcgtcggtgtagatgggctttccgtattccagaattaccttggcgggtttgatcttgggaaaatggtcctcgaagatctgagaggtcccggtcatggcaatgggaatgatggcacattttgccttggaggcaattttaaagctgccttcatggaagggcagcatgtccagctcgctgtcgttggtgttccttgtgccttccgggaaaatgcagatggaaattccggatttaatcttttcgatggcggtgagaatggtctgcagaccctgcttcaggtcatcacggtccaggaacagacagtgcagatacttcatccagtcacggagaagggggtagcggagcatttccttttttgccacatatccggttctgcggggacagcgggtataggtgagaaggatgtcaaaatagctcctgtggttggcaatatagagaacaggagcgtctttggggacattttcttccccgatgacagtcacctggacaccggaaatctttaagaccaggcggaacactgcctggaccaaatgcagagagctggtgtcctttttcatgggtgaaaattttccgatgacccattccgccaacaagataggaatggacaggatcagaaatccgatcaccacaatgcaggttaaaatgaatcttatcataagaagcttcctttcgcatctttcttatcccttagtataataaaaattccacattcttgcaataaatcttttcttttccacatacaattaaaataagaattaaatataggagcggtactatgaaaaaaatcagcaggctttggcctgtttttgtggccgccggcatgggaatgctgatctttctgggagggtgcagcatcaccaaggtggaccagaaggacgcccaggccatagattatacggtggtgagggaggaggatattccccaggaggtccgcaccctgatcgatgaaaaaaaggaaaaggaatttcaaatgacctataaaagcggaaattacctgtatctggtcaagggatacggccagcagctcagcgggggatacagcatccaggtggaggagctgtccaagtcagagacagcggtttttttcaagaccgtgctcataggaccttcccagaaggagcagcagtccaaggagccgtcctatccttatattgttgtaaagacagctgatcaggaggaaccggtccaatttcaataaaaataaaagcggtatttgaattacccatggtggattgaaagaaataataagaaaatgaaagagagagggagagaattttggaattaagaaaagaaaacatccatgtattgcgagtgaaaagccaggcagcaacccaggtgacctttgatgaggactataatgtgccagatgtgaagccagatattgggaggatgatccagagcaaggcagaggtgcagatcgatgaggtaaatctcagtgaaaataaagcttttatcaaggggaacctccaggcggatcttctctatgtgggggaagaggaaggaaaagtctacagtcttactgcagttttacccattggggagactttgaacctggatggcattgaaagtggagataaattgtgcctgaagtgggagattgaggatctgagcatccatgtgatcaattccagaaaattaaatatcaaatcggttgtcaccttcctggcttgtgtggatgagctggccaccgttgcccttccggttgaggtgcaggacgaggagatctctgtgaaaaagaaaactgtccgggtgatgggcctgtgtgtacatagaaaggataccatgcgggtgcgggaggagatttctctggcttccaacaagcccaatatttcccaggttctgtggaataccatggaggtgcggggactggacatccggccgggagagaaccaggtgcaggtgaagggtgagctgtttgtattcgttctgtatgcaggagatgaggagggaaatccccttcagtggatggaatatgcccttcccttccgaggggaggtggagtgcagcggctgtatggaggatcttctgcccaacattgaggtgtcggtactgaagaaatctctggaggtaaagccggacgcagacggggaggagcgtcttctccaggcggatgcggtgctggagctggatatgaagctttacagggaagaggagcatgagatccttctggatgtgtatacgcctttggcggagtgtacgcctgtgggacataaggaagttctggagagcctgcttatccgaaatttttccaagtgcaggatcaatgaccgggtggaaatgaaggaaacccagggaaaaatccttcagatctgccacagccacggcaagatcaaggtggataagaccaaggtggtggagaaggggatccaggtggacggcatcgtccatgtgaaggttctgtatatagtggggaatgaccagatgcccttctattccatggaagccatggtgcccttcacccatgtggtggaggcagaggggatcacagacaactgtacctattatctgcgcacagacttagagcagctctccacaaccatggtggacagcaatgagatcgaggtaaaggcagtactcagcctgaatgccctggtactttgccgtcaggaggagcagatcatggaggagattcgggaggagcctctggatatggataaaatccagagcatgtcaggaattacggtgtatatggttcagccccaggacactttgtgggatattgccaagcggtattacacaacggcagaccagatccgccggctgaatgacctgggagaaggagagccaaagccgaaccagcccctgcttttggtgaaaaatgtagaagcctagaaaacactgttgaaatctgaggagatatcatataaaataaagataatgtagtactgtatacaaagtacaaaagcgctggaggtatgtgatgcggctgagggcaatggctaagataaatctgggtctggatgtgcgaaggaaacgacaggacggttatcatgaagttcggatgatcatgcagtccatccagatgtatgatgttttagatatggaaataagacaggagccgggaatctcgctttctaccaatcttccctatattccctctgacagcaggaatctggtgtggaaggcggccagccttctcatggaggaatttggcgtgagggaggggctggtgattcatttggagaagttcatccctgtggcagcaggaatggctggcggcagctcggacgcagcggcggccatggtgggtgtgaaccggctgttcagcctggggcttggagagaaggcacttatggagcgggcagtgaagatcggtgcggatgtaccctactgcattatgcggggcactgccctggcagaagggatcggggagattctcaccccgctgcctccgctgcccccctgttatattctagtgggaaagccatctgtgaacgtgtccaccaagatggcctatggcaatctcagggcggatagtatccagagccatccggacattgacggccagatccgggccctgcagaagggggatctgagaactctcacggagttgatggaaaatgtgttccagccggggatcgagtccctttatcctgtggttgcccagatccgcagccatatggaggagcacggggccctgcgtgcccttatgagcggaagcggtcctacggtatttgggatttttgatgatgagaagaaagtaaaaagggcagcagcagccctgcgaagcagccatctggcaaggatagtttttgctacccagccttataacagggagaggatacagctgtaaacagaaacaggctgaattcatggagtacacaggaggaaagaactatgaccagtgatttttcaatccatatggacgaatatctgccccttcgggatgtggtgttcaatacccttcgtcaggcaatcctgaagggagagctgaagccgggagaaagactcatggaaatcgccctggctgagcggctgggggtgagccgcacgcctatcagggaggcgatccgcaagctggagctggaggggctggtgaaaatgatcccccgccggggagctcaggttgccaacattacggagaaggatttaaatgatgttctggaggtgcgcatcggactggaaaatatggccattgagaaggcctgcaagcgtatgaccaaggagcagctggaggagcttctgggcgctgcccaggcgtttcgcagaaccatggcagagggcgatttaacgaagctggcagaggcggatgtggccttccatgagattatttatcaggcgtcggacaacctgcggttaaaccaggtattaaataatctgcgggaacagatctaccggtaccggatcgagtacctgaaggaggaggacaccagaaagctgctggtaaaggagcatatggagatttacgaggccatccggaacaaggatgtggccagagcccaggaggtttcctttaatcacgtggagaatcagagaaaggccattatcagatccatacagaacgaggaaaaaaaggaataaaatagaaggatcagcggatactaagagagacaggaaatggtctctctttttcttttggaaaaaagaggagagcggagaggagtgagacaatgacagaaccccgtcctatatcagattccatcagggaaaatgagaaatatctcagggcacggctggagaattgtgcagatatcattatccggcccatgcgtctggggaacgagaaaaaggtagaatgcctggtggtatatccagaggtagcggtttccaacatgatgctggaggactctgtgatcggcaagctgatcaatcatttttgggagatatcccccggggagatgaaaacctttctggagtacaacagtctgggaatttctgatgtaaaggaattgtatgacatggagcaggcccttgccgccatgctggcaggaaacgccattttcttcatggacggctttaccaaggccataaagatttccagtaagggctggcccaatctgggggtaaacgaggcggagacagagaaggtgctgcgagggtccaaggagggcttttccgacaccttaaagagcaattccgccctgatccgaaaaaggcttaaggacacccggctgaaggtggaggagatggaggtgggggtgcgctcacataccatgctgcagcttctttatgtggaggatttggtccaggaggacctgctcaatgagatcaaagagcgtctggatgagtttgaaattgacgggatcctggacagcggaatggtggagcagcttgcggaggaagtgtggtattcgccttttccccagtttcagacaacggagcggccggaccgggcggctctggagcttttaaatggcaggatagtcctactgtgcgacaattcccccatggctctactgttccctacaggcttccacaattttatgcagaccagcgaggaccggtacaatcgttttgagatggtgacctttcttcggatcctccggtatttggctatgctggctgccaccttgctgcctggcttatatctggcggtgatccgttttcatacacagattctgcctggaaacttgattctttcctttgcggaggcccggtcaggggttcccttctccagcattgtggagctggtctttctggaactggcctttgagctgatccgggaagccggggtgcggatgccgggggccctgggaaatgcggtgggcattgtgggaggcctgatcatcggacaggctgcggtgagcgccaatcttgtgagccctattgtggtgatgatcgtagctctcactgcccttggttccctggccatacccaatgaggagttttcctcccccttccggctgctgaaatatatgtttttgtttttgggaggttttctgggcatctatgggatcgttctgggctgctatctggtggtgtcccatctggcaggactgctcagcttcggcgtaccttacctgacaccctttgtgaagccggagaggacaagaggacagggggacggaatcctgcgtcttccccttcggaaaatgaagcagcgtcccatttatgccagctcagaccagcgggtgagacttaagaaacggggtgaatccaagtgaagtttgctgaaaataacagaatttcccacagacagctccggcggcagatcatcctggccttcctggcccctgtccttttgtgccttccagggagggaacggctgatggggatccatggagttctgggggctgtggcaggtctggcggtcctgcttttttatgtgatttttcttatacgggtgtccccctacttcagtgatttgaagaaaagtgcaggaggtttctggggcagggtgacaggaatctttttcctgtcctatgtaattctcacaggggcatatcttctgtgggtgctggaggatattgtgccggcgagacttctggtgggtgtgcccagggagaccgtgggtgtgctggctgccattgtatgctccctggggatccacaggggaattcagaagcgggggagggtggcagaggtatctgcagggatccttctaggaggggtcctgcttatgctggttctttctctgaatcaggcctctgcctccaatttacaggagatgctgggggaattttatttccacaaagaggagctgtttaaggactggtatggggtgctgtgcgcttttgcaggcctgagtcttctcccctttgcaatggaatttgtggaaaagaaaaactccgcgggacggtgtattgcggcggctctggtgatcctcacagggatattggtagcagtgcttctgatccttccggcggttctgggatgggaccggctccaggcagagaggtatcccattttgcccctccttgccggggcagatcttcccggagacattcttgcccggtttgatgtgatctggctgtcctttctgttgtatgccctgctgttttccatagggagcctgttttattacggaagccatatcctgcagtctgcccgcatgggaaaggggcgtttctggcagggagcgcttgcattggtgctgtctgtgaactggatcccagggttttccatccaagaattttatggtagatatgtggcttatatttttctgccaggggtgcttcttttgcaggtgctcttttttataaagggcagaaggaaacgaaccaggtctgcagtggcggcggccctgatggtctgccttttcctggggggctgtgcaggtgtggagccggagaagcggctgtatcctctggccatgggcgtgagcttggaccaggacaaaaagctggcagtcacctatgcaatggcggacctgcaggcctccaccggccaggagaaaaaagaggacagcggttttcgctccaccttggtttttaaaggggaggactttagtcaggtaaaagagtcctatgacagaagtcaggaaaaatatctggatctgggccacttggaggtactcattctgggcagggagatgacccaggaggggcggtggaatgtggttctggaatatttaaagcaagagccctatgtgggagaaaatatttatctgtttgtggcggacgatgtgggagcggtgatgaatttccagggagccaagacctcctccataggggaatatctcactggaatttatgaaaaccggcccagtggagagacaaaaaaaggagttacactccgggacgcttattatgcctggtaccgggatggaagccttatagatcttccgcagctcgtcttgacggaggaagaagtgcgggtagtttagaggatgatcaaaaaggccccttggacaggtataagcacaggggataggggaatactccggatagtgaaggaagaaggagtatcaaggaatgaataaaaagaaaaaagcactcatatcaatagcagcaggcatggcggcagctatacttttaggttcaggaggggctggaaaaacaccagacatccagccgccggcctcctatgtgggggcctggtggggatacctctacccaagattttgttttgcccctgaaggtgataaaaaggaggaaaaacctcaattttccttctgggttgcgaaagtactggattggtggtaaaatgatgggcaaaatcataaggtattaatggagataagccatgagcagagacagagaggccccggtgggagtgtttgattccggtgtgggcggcctgacggttgccagagaaatcatgaggaaccttccggcggagaaaattgtatactttggggacacggcacgggttccctatggaagcaaatccagagaaaccgtgcagcgttattcccgtcagatcattcactttctaaaggagcagaatgtgaaagccattgtgatcgcctgcaatacagccagtgcctttgccctggatgagatccgggaggagctggagattcccatactgggcgtgattgagcccggagcggtggtggcggccagagagaccaggaacaagcgggtgggcgtcattggaactgtgggaaccattggaagtgggatccacaaggaatatctggagaagctggacccagagatcacagtgatcggaaagccctgtcccttatttgtgcctcttgtggaggagggatggctgaaggatccggtgactgaggaggtggccaggagatatctcagggagctccaggagcgggatgtggatactctgatcctgggctgcacccattatccccttcttcgttctgttctccaacagattctgggagatcaggtgcggctggtaaatccggcctatgagactgcgttggagctgaaacggcttctggaagaaaaggatctgcaggatcgaggaagcgaggaggaggaattcccttaccgcttttatgttagtgacttggcggagaagttccagagctttgccaattctatccttccatacgatgtgaaaatgacacagaaaatcgatattgaaaaatattaaaacaattaggagaaaccaatgaaaaaggatgtattgatccatgtaaaggggttgcaggttttggatgaacagacccaggaggatcccatagagatggtgatcccagggcaatattacttccggaacgggagccattatctccgatatgaggagcggatggaggactttcaggagcccactgtgaactatgtgaaaatctcagaatccgctgtggaggtgagaaaaaaaggactgatcaacgtgcatatggtctttgaagaaggaaagaaaagttttacatactattcaacgccctttggcacaatgcagatgggaatctcggccaccaatgtacaggtgactgattcccaggagcatctgggtgtgaaggtggattatgctctggacatgaatgaacagcatgtggcagactgttacctcaccatagacgcccaggagaaagcatccaggggactggccctgtagagagcaggacaggatccggtctgcaccgggcctgctaaaaggataaaaaataagagtgtttaccacggataaaggttgtggcagacactcttttttctttgacagacatttacataaggattccctgtatactgagatgtcagtctttttttaataattttttgaaaaagccttttttcttggcgggagcttctaatggtcccctcataccccgcacaccaacaatgtacagaccgctgacttctgctttgacttccttcttcaccggaatcagatcataaaccttctcgtctgcaataagtactgtgatcttgggccctacctttgccttgacaatgggcagcttggaacggcgcatcagtttcggagtctggtcgatcaccatctgagggagcccggactctttgatgggaagccgctttttgtcaatgatcagcatggataccgtctgctttgccgcctcgatctgtgcctgctgtgcctcctgctttttctgcattttcttgccgacaaagtacagaacgatcagggcaataatcaggatgatcaaaataattaaaagaacatgccagaccttcataataagcctcctagttttccttgggaaatgtagtaatacacattacgcgaactatattttaccatcatttacgaaaaaaggcaaatacaaaatatatatttgggagaaaaatagtggaaattactacgcgttccagttataataaaaatatcgaccaaaaagtacaaaaatcgacgatttgtgagaaatgacggcggggagatatttggctgttaaggttatagaaggggaaaaggagtatgaaatgaaggaaaggaaaggtttggaaggaaaatctgggatgcatgcaggcgatgggagcggcaggggtccggatattttagatgtcatggacctggcggcatctgaggacggagaagggcaggatgcggttgcctggcctgatctgaaggaggaagacaataagaaaacggatggaaagagggaacagggcaggaaagtctccggcatggaagcagacagcgagaggacggatggtaagaaagcacacagcggcagtgcggatagtaacggagcaggcctggatgagcaggaggaattgacccaggaggaaaaagagtatctggccaggcgggcggacagacaaagacgccggaaaattcaggagagacgacggagaagaaaacagaaatttatgatgggtattctgggagctgcttccctggccattatcgcaggggcggtggtgggtatctcaggagtcctcagggataagaaaggaaaatcaacagcagtcacacaaaacggagagaatcaggctcagatttccaaggaggacggacaggtagagggcagtcagcaggagaccgctgctccaactgtcatggaacaggcagaacggatggcggcccaatatgattatgacggggccattgccctgcttcagtcccaggaggattttggacagaacggggaaatgcagcaggcggtgcagaattatgaagctacaaaagcaacctgtgtggaatatccgctggatcagatcacccatgtgttttatcataccctgatcaaggatacggcaaaggcctttgacggggacagtgaagagccgggctataaccaggtgatgacaaccatcgatgaatttaataaaattacgcagatcatgtatgacaagggatatgtgatggtaagtctccacgacatgggatcctttgatgagaacgggaatctgatccctgggaccattatgcttcccccggggaaaatcccctttgtgctgtctcaggatgatgtgagctattatcattatatggatggggacggattcgccacccggctggtggtggatgaaaatggcaaggtgaagtgtgaatacaaagaggaggacggctctgtgtcggtgggagattatgatatggttcccctcattgaccgttttgtggaggagcacccggacttttcctacaggggaagaaagggaattctggccatgactggctataacggagttctgggatatcgcacagacattgcctataagaccagggaaaatctggatgagaatcagattcagttcctggatcagaacccggattttgattttgacagggaagtggcccaggccaccaatgtagccaatgtgatgaaggcaaacggctgggaatttgccagccatacctggggccatcagaatgccacccaggcttcagcagagaagctccaggaggatgacggccgctggcagaattatgtggcgcccattctgggcaagacggatgtggtcatctttgcctttggcgcagatattggaggggtgaatgattacaatgaatccaaccccaaatttaattactacaagagcgcaggctataattatttctgcaacgtggacggcagccagtactgggtgcagcttggccccaactatctcagacagggcaggaggaacctggacggataccggatgtattacaatccggaaatgcttacagacctgtttgatgtgtccgctgtttgggactcttcaaggcccactccggtacctcctatgggttaggaatgtaaaaaaacagtaaaataacattggataagcttcctttttgggtgagaatgtggtataactcacattaaagattacccaaaagggagcttttattttggaagggagctatttatgaagaaaaaagcaattttagcagtgcttatgctgagcgctgcattaaccgccactgcctgtggggaaccaaaggaatcagcaaagacagacagcgcaagcagccaacagacagataacaaggaggaggcagcggataaggaaacagaggaggatacccagaaggacagccaggactccaaggaggaagccggccaggagcagacagatgagaacaaggaattccgcctggtatctgtggacgatgtaagtaaatatgttactcttggggaatataaggggctgtctttggacaacaccgtggcacctatcagtgacgatcaggtggaggccaggattgaatcagagctcacccagcatgccacactggtaacagatgcggatgagactgtaaaagagggcgatattgccaacgtaagctatgtgggaaccaaggacggagtagcctttgaaggcggaaccggggacaactatgatctcaccatcggaagcggccagtttattgagggctttgaagagggcattgtgggaatgaaaaagggcgagacaaaggatttggagctcaaattctcggaggcctatccagctcaggacctggctggccaggacgttgttttccaggtgaccttaaacagcatcaagcgtgcctctgagctgaatgatgagtgggtgtctaagaatacagattatgccactgtggatgagtaccgggaaggactggctgtggaaatggctgatgaagctaagagcaccatggaacagacccttctgaagactgcattttcctctgttgtggagggtgcggaagtgaaggaatatccccaggaggaccttgacgcagcggcagaggagtacagaagccagatcagctattatgcccagcaggcaggaatggagctggaggaccttctgaaagctcagaatatgtctgaagaggatttccaggagcagtgcgatcaatatgcccagttccgtgtaaaacaggcccttgtggtgcaggggattatggatgcggaaggactgagctttaaggatgacgcgtgtgtgaagcagggcgaagagctggctaagcaatacggagaagagaatttccagggccttgtatctctgtacggcgaacaggcttcctatgagtccctgggtcttcagtatgtaagtcaattcctggtggataatgcccagcttaaggaggataccacccaggaggaaccggccgacatggaagaagagaccttcaaggaaggcagccaggataaaaaggacgcagccaaggaagacgtgaaggacgacgccaaggaagaggccggagaagacagtaaagaagacacgaaagaagatacaaaagaagctgacaaggaaagcagtaaagagaataatgccgccaaggatgaggagaaataattccttttctcaggcacagcagtatataaaaaaagttcgcgggaaggatattcctgcgaactttttttgcaatctagtgatgttgggaaaagaactttagtcttccttacatactgctttatatacaacagcagccagggcagcgcctacaagaggagctaagataaacacccatacctgcttaagagcctgtccgcccagcagaagagctggtccaaggcttcttgcggggttgacggaggttcctgtaagagggatccccagaatatgtacaaatgcaagacacaggccgatgacaagacctgcaacggttccggttttggctttgtctgtgacacccaggatagtcatgaggaatacgaaggtgagaatgacctccaccacaatggcgccgcccatggacagaccgatataggatgcacttccgtagccatttgctcccagacccacttcctggatggtgcccagtgtggaagagctgataatgaaggataatacgccggctgctgcgatcccgcctaaaatctgggcgatgacgtaacctacaaagtccttcacgtccatacgtttgctgatgagcatggccagagaaacggcagggttaatgtggcatccggatacatctccaatggcgtaggccattgccacaatggaaaggccgaaagccatggaaattcccagaattcccagcttgccgtcaattcctccggatagtgcggctgagccgcagccgaacagggtcagcgtgaatgtgccgatgaactcggctagatactttttcataaaaaaacctccttttgtagtctggttttatgatatcatgagacaaaggggaaaggtatcattattccgtgaaaaactgaatttttcgtgaatgcttatatttttcggtttcctgacattttcatatgggaaaatgtggcgctttcatttgcaaatacggtctgggtgccttataatagacactaagaatgatttctgtccatgcaggatacgcatggggaaaaggagaacgcgtatgattattaaaaacggagcagtatttggggaagacggaacctttactgtgcgggacctgtatgtggagggagataccattgtggcttcccgggatcaggtgacggacaagacagagatagatgcagcaggcttattcgtgctgcccgggctggtagacattcacagtcacggagccttcggccacgatttcagcgatgcagacaaagaaggtctcaaggagatcctgcgttatgagaagaggaacgggatcacttcctactgtcccacctctatgacactgcctaaggaacagctgaaggagatttttgcaactctcaaggaggacatgaatctggagggcggagccagagttctgggcattaacatggaaggaccttacctggacgtgaagaagaaaggggcccatgtggcagaatatatccgcaggcctgaagcagaagacttccgggagctgaacgaaagctgcggaaatatggtgaagctggtgactctggcgcccaatgtggaaggggccatggaatttattgatcaggtgagccaggaggtgtgcatctctcttggacatacggctgcggactatgagacaagcgtagaagccataaaaagaggggctcatcatgtgacccatctgtacaatgccatgatgcctctggcgcacagagacccgggattgatcggggcagcctctgatgatccggaatgtatggtggagctgatcagtgacggccttcatattcatcccagcgtggtgcgggccaccttccgtctgttcggaccaaaccgggtggttctgatcagtgattctatgatggccacgggaatggaaaacggcacctatgagctgggaggacaggaagttaccatgaaggacagaaaggccaccctggcggacggcactttggccggttctgccaccaacctttttgactgtatgagatgcgccatatccttcggcgtacccaaggaggaggcgatcttcgccgccaccagaaatccggcaaagagcatcggggtctatgaccaggtaggctctttaagtgtggggaaaaaggcagatcttttacttgttgaccaagacatgaatctgaagcaggttttctaaaatacgaaatttttcaaaggcacgcagaagaaagaggacaatacatacagacagagagtgtattgccctctttttccataaaaataggcagatacgtctatgaaaagtctgtgggaaaggcctttgagagaacagtaatcattgacgttggaggtctggattggtataataaatacactagaatgactgaaagtcagttatgctttgaatatcaaaattccatggatatcggaggaaataaaacttgggcaaatggtttgaagaggcagtattttaccacatgtacccaataggtatggtgggcgcacccagaagaaatgaacaggaggaggttacacataaattcccggaattgaatgaatggctgccatatttggcgcagcttggatgtacggcagtttatataggaccactgtttgaatccacctcccacggttacgacaccagagattacaagactgtggaccgcagattgggagataatgaggattttaagaaatttgtgaagcaggcccatgaccttgacatcaaggttgtggtggatggagtttttaatcatactgggcgggaatttttcgcatttttagatatacagaaaaacagagaacagtctgcctgctgcagctggtacaagggaatcaattttggctggaattctccttataatgacggctttggatatgaagcctggagaaactgttatgagctggtgaatttgaatttctgggagccacaggtgagaaagtatctgctggaggtgatcggctattggattgataccttcgatattgacgggatccggctggactgtgcagactgtctggaattctccttcatggaggagatgcgccggttcaccagggaaaagaaagaggatttctggcttatgggagaggtgatccacggggattacagccgctacatcggtcctgatctgttggacagcgttaccaactatgagcttcacaagggactgtattccggccataatgaccataattattttgagatcgcacacaccatccgcagagagtttgatgccaacgcagggatctataagggtatgaagctgtactcctttgtggacaatcatgatgttgacagaattgccagcaagctgaaggaaccaggacatattcttcctgttcacaccctgctgttcactcttcctggaattccttctatttattatggatctgagtgggggatccagggaaggaaagagggagccaacgatgatccccttcgcccggccgtggacctgaaggaggcattggagaacatgccagatcctaagctttatgaatgggtgaaggttttaggaaagattcacagggaggagccagcctgctcctatggcagataccaggagctgcttctcacaaaccgccagtatgcctttgcaaggcttctggaggataccggtctggtggtggcagtgaacaatgacgacaaggaagcagagctgtctgtaagagagcccatgcccaacaagagctataaaagcctggttgacgggaaaccataccaggctgagaacggagtgctccgccttgtgcttgggcccaacgaaagtcagattttatcaatgtattaagggaggattctcacatgggagaaaaaatgcacattacagagcttgaccaatatttattcggtcagggaacacattatgacatttacaaaaagctgggggcgcatcccactaagagagggaggacaaagggcgtgttttttgcagtttgggcgcccaatgcccagtctgtatctgtcattggagattttaacgaatgggatttagaagcatgccccatggagaaggttggtcccattggcatttgggagacgtttgttcccaaggcaaaggtgggagatctgtataaattttatattgttggcatgcatggagaaaagctgtacaaggcagatccttttgccaacagtgcggagctgcgcccgggtacagcctccaaggtggtagatatagagaattataagtggaaagattctgtatggatgaacaaacggccggaatttgatgaaaaggtgagtcccatggccatttatgaggtccatccgggatcctggaaaaagcatgccatcacagaagaggatggggacggcttctacaattatcgagaatttgcccatgaactggccaagtatgtgaaggagatggggtatacccatgtggagcttatgggaattgcagagcatccctttgacggttcctggggttatcaggttaccggctattacgctcccacggcaagatatggaacaccggaggattttaaatatctggtggattatctccaccgtcagaagatcggtgtgatcctggactgggtgccggcgcattttccaaaagatgctcacggacttgcgaattttgacggaacggcagtttttgagcatgaggacccccgccagggcgagcatccggactgggggacgaaaatttataactatggaagaccggaagtgaaaaacttcctcatagccaacgccttgttctgggtggaagaatgccatgtggacggcctgagagtggacgccgtggcttccatgctgtatctggattatggaaaaaaggacggtcagtgggttgccaacaaatatggggacaacaagaatctggaggccattgagtttttcaagcatttgaacactgtggttctgggcagaaaccatggaagtgtcatgatcgccgaggagtccaccgcctggcccatggttacaggaaaggtagaggacgggggtcttggattctccctgaagtggaatatgggatggatgaatgatttcctggaatatatgaagctggacccctatttcagaaagtataaccaccacaagatgactttttccatgagttatgcctacagtgagcggtacatactggtgatctcccacgatgaggtggtgcatctcaagtgctccatggtgaataagatgccgggagagctggacgataagttcaagaatctcaaggccggatatgcctttatgacctgccatccgggaaagaagctgctctttatgggacaggatttcggtcagcttcaggagtggagtgaggagagagagctggactggttcctgctgggtgaggataatcacaaaaagctccaggactttgtgaaggagctgctgaagatgtacaagaaatatccagccctttatgccatggacagtgatccggagggatttgagtggatcaatgccaatgacggggacagaagcattttcagttttgtgagaaaatctcctactgggcggaacaatctcctctttgtgtgcaacctgacacctgtggagcggccagactaccgggtgggagttcccaagaagaaacagtaccgccagatactcagcgaaaacggcccggtggagcccaaggagcatgtgtttaaggcacaggcctctgagtgtgacaaccgtccctattcctttgcctatcctcttcccgcttatggagttgctgtttttgtctactaaaagtatttgcaattcctggaaagttgtgatatagttagcccggaaccagaattgatgaaagtaaaattcatctggaaaggagaaaatctcgatgaaagtatcaaatatcaaagacattgacaagttttttaaggttgtagacagctgtaaaggcagagtggagctggtaaccggtgaaggtgacagactgaacctgaaatctaaattatcccagtatgtttctttggctactattttctccggcggaattattccggaactggaaattgttgcgtccgaagcagaagatattcagaaattaatggactttatgattaacggctaagaaaataggaacactaaaagaagggggcgtgcacatctgctgttcaggcagatgcatgtcccctgtttaactttaaaatataaaggtacaggaaccagggggtaaaatcacttcctggtcaaatgtacgtgaaaaggagaatggggaatgacaaaaatcgacataatatccggcttcctgggagccggaaagaccacattgatcaaaaagcttctcagagagggatttcagggagagcaggtagtccttatagaaaatgagtttggggagatcggcattgacggaggcttcctcaaggaagctgggatcgagatccgggaaatgaattcaggctgtatctgctgctctttggtgggagattttggaactgccctcaaagaggtggtggacacctatcatccggaccggatcgtcattgaaccctctggagtgggaaaactttcagatgtgatgaaggctgtgaaggacgtggaacaggatgtggacatctgcctgaacagctataccacagttgtggatgccaagaaatgcaaaatgtatatgcgcaatttcggagaatttttcaacaatcaggtggaatacgccggggccattatcctcagccgtacagacattgtggatgacaaaaaggtggaggcagccctggagcttgtgcgcaccattaacaaaaaggcggctgtcatcaccacaccagtggaggagctggacggcaaaaagctggtggaggtaatggagcatcccgtatccctggaacaggaactgctggatgaagaggtatgccctcagtgcggccatatccatgagcatcatcatcatgaggagtgcggggatggccacgaccaccaccatgaggaaaacggccatgagcatcatcatgaggaatgtggccacgaccaccatcatgaagaatgcggccatgaccatgagcatcaccacgaggaatgcagtcatgaccatgagcatcatcacgaggaatgcggctgcggccatgaccatcaccaccatcatcacgcagatgaggtgttcacaagctggggcagggagacggtgagaaagtataccagggaagagctggacaagatacttaaggttctctccgatacagaggattatggaattgtccttcgggctaaggggatgcttcccacaccggaaggaaaatggatttattttgatatggtaccccaggaaacagagatccgggagggagcagcggactacacgggacgtctgtgcgttatcggttccaagctggatgaggacaagctggcagtgttgttcggcttataggaggaagagagaatggatgaaattacggttccgatttatctcataacaggttttctggagagcggaaaaactacgtttttgaattttaccctgcagcaggactattttttcatagacggtaagacccttctcattctctgcgaggagggagaggaggagtacgacagggaagccctgaaggtatgcaacacagacgtggagattctggagagccctcaggatcttacctatgagcgtctcctggccatggatgtggttcacaatccggaacgggtgattgtggagtacaatggaatgtggctggcaagcaagtttgaacagatgagaaaaccccagggctgggggatcgaacagcacattacctgcgtggatgccagcacctttcagatgtacatgaacaatatgaagtccattttcatggacatggtgcgggaggcggacatggtggtctttaaccggtgcagccccacggatcccctggcttcctaccgaagagggatcaaggttgccaaccaaagggcagaggtgatcttcgaggatgaggagggggagattgaggacatttttggtgaagaaatgccctttgacctggaagcccctattgtggagatcctgccagaggattatgggatctggtttgtggacaccatggaccacccggagcggtatgaaggaaaaaccgtgcgctttaagggacgggtcatgcatcccattggagccggaggaaaatattttgtccctggcaggactgccatgacctgctgtgcggatgataccacctttctggggtatatgtgtatgagcgacaagaccgccaagctgaagcggggaagctgggtggaggtcaccgcaaaggtatgtattgagcagagaccggaatatggtggagactatggtgtggttttatatggacagcagataaagagctgtgaaccactgccagaggaaatggtttattttaattaggagaaaacaagcatatgtatttaatagcaggacttggaaacccgggaaggcagtatcaggccactcggcacaacatgggatttgataccattgattacctggtggagaagcaccgggtcccccagtccggggtgaagttcaatgccatgtacggaaaaggaatgatcggcagtgagaaagtgattctcatgaaacccctcacctacatgaatttaagcgggggtccggtgagagagatgctcaattattttaagattgagccccagaccaatttgatcgtgatctatgatgacattgacctggagcccggccagcttcgcattcgtaagcagggcagcgccggaggccacaatggaatgaaggacatcatcagacagattggaacccagaattttatccgcataaaagtgggcgtgggggcaaaaccctcaggctgggacctggcggactatgttctggggcatttcagcccttcccagagaaagatcatcgatgaagccattgcaaaggcgggagaagccgtggagcagattctcacagaaggtgtggatgcggctatgaatgaatataatcgaaaacagaaaccacccagggaagaatgagagggaaggcaatggacgcatttgtaacacccttaagggagctggcggaatttgaagagatctgcagtaagataaaaggaaatcagggagtccttcagatcaccggctgtctggaatcccagaaggcacattttatctatggactttccggcctttttccctgccgccttctgctggcggaggacgagcgcagggccaaggagctgtatgaggattaccgcttctatgacaaaaatgtatgctactatcctgccaaggaccttttgtttttccaggcggatgttcatggaaatctgctgatccgtcagaggatgcgtgtgatccgtgcacttctggagcaggaggagctcacagtggtcaccagcattgacggatgcatggattatctgatgcctcttggggaaatccaggaaaagatcatccggttccagggtgacagcaccgtggatatccagaagctttccaaggaactggtgtccatggggtatgaaaggacggggcaggtggaagctccgggacagttttctgtaagaggagggattgtggacattttctccctcacagaggacaatccctggagaatcgagctgtggggagatgagattgactctatccgaagctttgatgtgcagagccagaggtccctggaaaatctggatgagatcttcatctatcctgccaccgagtggtccgggagagagaacatggtatctttcctggactattttccaaaagagaagactctgtttgttctggatgagcccaaccggctcacggagcggggagaggcagtggaggaggagtttttggaaagccgcaggaaccgggaagcggcaggagagcagaaacttccccacaactggctgtgtcagttccagaccctgcgggacaggctgaatcatctgaactgtgccgccctgtgtgccctggagcccaagcaggctcactggaaaatttccgataaattcaatctggatgtaaagtccgtaaattcctataacaacagctttgagctgctggtaaaggatttgaagcagtataagcgtcagggataccgggtggcccttctgtccggttccaggacccgtgcagagcgtctggccaaggacctttcccaggagggcctgaacagcttctatggacaggattacagccgccttattcagccaggagagctgatggtggtgtacggtcatgccaagaagggctttgaatatcctctgatcaaattcgtgatcatgaccgaaacggatattttcggccaggaacagaaaaagaagagaaagaaaaagcattacacaggagagaagatccgggattttgccgagttatccattggagactatgtggttcatgaaaaccacggccttggaatctatcggggcattgaaaaggtggaagtagacaaagtcgctaaggattatattaaaatcgaatataagggcggcagcaatctgtatattctggcaacccagcttgacatgctccagaaatatgcaggctcagatgccaaggctcccaagctgaacaagctgggaacccaggagtggaaccgtacaaagtccaaggtgaaaggtgcagtgcagaacattgccaaggagctggtggagctgtatgccaaacgccaggaaaaggaaggctttgtctgcggaccggacacagtgtggcaaagggaatttgaagagatgttcccctatgaggagacagaggatcagatctctgccatagaggataccaaacgggacatggaaagtaaaaagatcatggaccgtcttatctgcggggacgtgggatatggaaagacagaggtggctttaagggcagcctttaaggccgtacaggaaagccgccaggtggtgtatctggtgcccactaccatcctggcccagcagcattacaatacctttgtgcagagaatgaaggaattccctgtgcgggtggatctgctgtgccgtttccgcaccccaggggagcagaagaagaccataacggatctgaaaaaagggatggtagatgtggtcatcggaacccaccgggtgctgtccaaggatgtgcagtttaaaaatctggggcttctgatcattgatgaggagcagcgttttggggttgcccacaaggaaaagatcaagcagctgaagcacaatgtggatgtgctcaccctgacagccacccccattcccagaacccttcatatgagccttattgggatccgggatatgagtgtgctggaggagccccccatggaccgtatggccatccagacctatgtgatggagtacgatcaggagaccgtgcgggaggccatcaaccgggaggttaaccggggcggccaggtctattatgtatataaccgggtgaacgatattgcggaggttgccttaaatattgccaagctggtgcctgacgtgcgggtggattttgcccatggacagatgagcgagcgggagctggaaaaggtaatgtatgactttatcaacggggacacggacgtgctggtgaccaccaccattattgagacaggactggatatctccaatgccaacaccatgatcattcatgattcagaccggtatggtctgtcccagctctaccagctccggggcaggatcggccgttccaaccggactgcctatgcctttttaatgtaccggaaaaatatgatgctcaaggagacagcagagaagcgtctggcagccatccgggagttcacggatctgggaagcggatttaaaatcgccatgcgggatctggagcttcggggagccggaaatctgctgggtgcagagcagcatgggcacatgaatgcagtggggtatgatctgtactgcaaaatgctcagcgaagcagtaaaagaggccaagggaatccacaccatggaggactttgagaccaccattgatctggacatgaatgcttttattccagactcttatatccccaatgagttccaaaagctggatatttacaagcgtattgcaggcattgaaacccaggaggaatacgacgatatgctggaagagcttctggaccgctttggagaaccgcccaaggctgtgctgaaccttctggccattgccaacttaaaggccatggcccatcatgcctatattcaggagatcaagcagcgcggccaggaggtgaagatcaccttctgggagaaggcccggatcaatccggcgggtattcctttgatcctggagaaacacagaagagggctggtatttaagaacgatcagaatccttgcttcctctatcaggttcaggaggattccatgaagaagatcagggattttgtggaggagatcgcaaggcttgcccaggagtaaatttgtgaaatattcttgaattttgcacaatagccttgccctatttcctaaaaaagtttatactctatagcagtgattacaatggtgacagtggaggaagaaatgaagaagtatatgagaaaagcagcccttgcggctttggcaggagcattatgcatatccagcctcaccgcctgtgggaaagaagagaacaaagaagaagaggccgtagagaccctggatgtgaaggaggttgtggcaaccgtagagaattctcagattccagtgggcgttttgagctttatggcacattatcagcagatgcagacagaggccatgtatcagagcatgatgggaaccagcgcttccggtatgtgggacgaggtagctgacgaggataccggtgaaacctacggagagcagtctgtgcgagacattctcagccagctggagatcatgtatctgatcaaggaacatgccccggaatatgaggtcacccttacggatgaggacatggagaagatccaggagaccgcaaaggcctttgcagatgccaatggtgaggaggttctggcacagctgggaaccagtgaagagagcattcaggagcttctggagctggccacttaccaggaaagaatttatgatcccatcgtggcagatattgaccgtgacatcagcgatgaggaagcgcagcagaccacagtgacctatgtggaggtttctactcttccaggagaagaggaagaagagcttacagaggatgaaaagtctgcgaagaaagaggaagcccagaaggttttggataagttaaaggaagatacagaggcagacatggatgcagccgccaaagaggtggatgaggagctgtcagctctggaaatgagctatcctgccaacgatgaggaggatgagaccatccccaaagaactgaaggaagccctggaaggtctggaggacggcgatctggcccaggaggttgtggaggctgaggacggctattatgtggtgcgtctggatcagcgctttgaccaggaagccacagagcaggagaaagagtccaccattacccagagagagaacgataaatatacagaagtcacagaaggctggctgatggatgccaaggtggaagtggatgaatctgttatgaagaagatcaagatcaccagtgaccatatcttcaccattcaggttccccagacaacacaggaaccagaggaaactcctgaagtgacggaagctggccaggaggcagaagagactcccgaagtgacagaggctgcccaggaggcagaagagactccagaagtgacagaagctgcccaggaggcagaagagactccggaggtgacagaagaaccccaggaaacaccagaggtgacagaagctgcccaggaaccggaggaaaccccggaaggaaccaaggctgcggataaggagaaaactgaggctaaagaaaccccaaaggtaacagagaagcccgagaaataaacggaatataaaagaaggattcccttgcttaaaaggtgcatgaagcgccaggcaggggaatccttcttttatacctgcttgtattgttccggcaaaagaactacaatgaaaaacagaggatggtgaaaaggaatgaagcatattttctttgttgaggatgatttaagtttaattaacggtctgacctttgcaattaaaaaggaggggtatgagattgatattgcccgcacaagcttggaagctgaaaaattatggctgaatgggaaatatgatctggttatattggatgtgtctttacctgatggctccggctatgagctttgcagaaaaattcgacagacttccaaggtgcccattatttttctcacagcagcggatgaggaaacagacattatcatgggacttgatataggcggggatgactacattacaaagcccttcaaattggcagtattcttatctagggtaaatgcgcttctgcgcaggagcggaaacttcgatcaggccattactgaacaaaatgtaaacggtataaccgtgtatccgctaaagcatgaggtctataaaaacggcgcgttggttgacttgactgccagcgaatataaattgctgtgcctgttcatggagaatccgaatattgttctatcacccaaacagattttgagcaggctttgggactgtgatgaaaattacatcaacggtaacaccttgacggtttatattcggagattacgcacaaaaattgaggatgatcccagtaatccgcagaaaattcttacggtccgccgcatgggctataagtggaataccacagattgaggtacgttatgagaatactggtaaatcggaaaataaaacaactttttggctgggtactgctgtctattggaatatttacgataatcgccgctgctgtttccggttttaaattgaaatatgcggtatggtatgtgctggcgtcatctgtgggcatggggatttttatttttacagttatgtatctgtatttcagggagcaagacaaaatcatggaaaacgcaatttcacaaataagagaatatatttctggaaatcaaaatgcccggattgaatgtaacgaagagggggaactgtacagattgttccatgaagtgaattctctggttgccattctgaatgcccatgctgaaaacgaaggcagcagaaaacggtttttgaaggataccatatcgaatatatcccatcaactgaaaaccccccttgccgctttgaatatttacaacggaatccttcaggaggaagtaaaggatcttccgattgtcagggagtttactgatctttcagagcaggagcttgaccgtattgaaacactggtgcaaaaccttttgaaaattgcaaagctggatgccgggatgatcgtcctggaaaaggccattgaaaacatatctgaaatgatgggctgtattgagaggcattttgtatatcgggcggagcaggaaggaaagatactgtttctttcaggcgatgatacgatgactctgcaatgtgaccgagactggttgattgaagcagtcagcaacattgtcaaaaatgcatttgatcattcaaaggcaggagataccataggtattgaatggcgaagctttgcatcggtggttcagattatcgtaaaagataacggcagtggcattcacccggaggacttacactatattttcaagagattttaccgcagtcgattctctaaagacaagcaggggattggactggggcttccgctttcaaaagccattatagaagcccacagcggaacggtagaagttgacagcgtgcttggcactggaacgatttttaccattaattttttagttcctacaaaattgtagtctgtttgtcatgttgtagtagtgtagtcgtgttactctttccatataaaataagaaagaggtgttggactgaatgaacttattagtggtaaagaatatttcaaaaacttacgggagcggcgaggctgccgtggatgcattaagagatgcggcattctccgtttccaaaggtgaatttgttgctgtggtgggagagtccggctcagggaaaagtaccttgctgaatatgatcggtgctcttgatacacctacctctggcaaggtgtttatcggcggcaaggatgtattttccatgggagaccgcagcctgacggtttttcggagaagaaatattggatttattttccagagctttaacctgatcccggagttgaccgttgagcagaatatcatttttccagtgctgcttgactatcagaagccaaataaaaagtatctggaagaactgttgacagttctgaatctaaaagagcgccgtaaccatctgccaagccagctatctggtggtcagcagcaacgtgtggccatcggacgggctctgatcacaaggcccgcactcattctggccgacgaacccacgggaaatttggatacacaaaataccagtgaggttatggccctgctgaaggaagcatccagaaaatatgagcagaccattgtgatgatcacccacagcaaaagcatcgcccagactgcagaccgtatcctgcaggtatctgatgggatacttacggactttgggaggtgctgtcaatgaaaagttatcttagcttgattcccatttcagcgaaagtacacacacggcagaaccgcatgacacaattgtgcattatattttcggtgtttatggtgacagctgtgttcagcatggctgagatgggggccagaatggagcagacaaggcttctggaaaagcatggaaaagtgtctttccaagaccttttcaacactacaatgggacagatgcttatgcttagcgccgtggtattgtttttattgatcctgattgctggagtgctgatgatctcaagcagtatgaacagcagtgtggcccaaaggacaaagtttttcggtatgatgcgctgcattggaatgagtaaggagcaaattatccgttttgttagactggaggctctgaactggtgtaaaacagcagtgccgattggtcttggacttggtattataacaacctgggggttgtgcggggcactgcgttttctggttggagaagaattttctaatattcctctgtttggtatcagcattcttggaatggccagtggtatccttgtgggggttattacggtacttatcgctgcaagctctccggcaaaacgtgcggctaaggtatctgctgttacagcggcttcagggaattcggacagtacccagaaggtgcgccatggagtgaattcccggtttttgaaaatcgaaacggctctgggtgtccaccatgccatatctgcaaagaaaaacttgatattgatgacaggttcttttgccctgagtattatccttttcttgagcttttcagttatggtagattttatcaattatttaatgccgcagtccgccagtacatcggacattgatatttcaagtaatgacggtaccaattccataaatcctgggctggttgatacattgaacagtataccgggggtagaacatgtctatggccggcgcagcagctttgatgttcctgcagggttaaatggtgatacgaccccttccggcattgttgatatggtttcgtttgatgatttcgacctggagtgtcttgctgcagataaagcgttaaaaaaaggcagtgatttatcaaaggtctatgggaacagcaagtatgttctggctgcttgggatcctaacagttcttggaagataggggacaagattcagacaggcggcgaggaacttgaaatagcaggtttgctgaaatatgaccttttcagcggcgatggtcttacacatggaaagatcacactcattatgtccggagaaacctttgtccgcttaacaggagtaacggactattcgcttcttatggttcaaacggcagggaatataacggatgaaagcattgaggcaattgaacgtgcagcaggcagtgattatgggttccgcgataagcgggatgaaagaacggcaggaacctattttgcttttgttatctgtgcatatgggtttttgggaattatcactttagttacggtgctaaatattgtcaacagcatttccatgagtgtatctgcaaggattaaacagtacggggctatgcgggcagtgggaatggatgagcatcaaatcacgaaaatgatttttacagaggcatttacctatgcgttctggggctgtgttgtaggttgtgcagccgggctggcgctgagcagattgttatatggcattcttatcaccaaccatttgagctatgcggtttggagctttcctgttacgtctctgacaatcatacttttatttgtgtttatcgctgcgactgtggcggcctatgctccggcaaagagaatcaggaacatctctgtaacagaaacaatcaatgaattatgatggatcgtgcttatgagagatatggaataaacgaattaacctggtatctgtcctgggacggtaaaggaaaaaagtagtcctgtagtaacaagaagtaggtgttgttctgtttgacggcggctttgagagatcaaagccgctgcttttggtgtgtggcaaggatctttgtgtccgcggcgtttgaaaatatatgtttaaaattatctgtgaaatatacagttggagttgaaaatgaaatagcttaagagaaacagaacatttcggatcactgtccatgcaggtctggaccgcctttatgcaaggggagattaaaacatatccagatacttttaatacaacaaaaaatagctgtaatatatacagctacataagttaccggatttgcctgataagttgtacttattcgctcagagttaagctgtacaattcagatggtggttttttgtgcattttgtacattgctcattttgttctctgtgctttatgtttcacattatacattggctctaagtgcttgtcaatatcttgtatgtatatttttgggaaatttgtattgttatttatttcacattggtcaacttgtatagtcctttcgcaaacttgtacccttatttatctgatgttgtctttgaatatgtccattttctgctgtttttataagcttgtactttccccatatacttgtacagccttgtgcttatttaaaagataaaatttaggaaataaaacaacaaatatacatattgcacaaagccccttctgtaaaataacctgcctgcctctgagcgaaaaagtacaaattataaggcggataatttgtaagtacaagtaaaaaacgccaaaacaagggaggaaccaaaatgaacaaaaaagtagttagtgtagcactcaccgcagcaatggtagcatccgcaacagcagtaggagcaacagcagtccatgcagaggacgctaaaaaagtagctctctgtatgcccacccagtccgcagaacgttggatcaacgatgctgccaacatggaaaaaatccttacagaaaaaggatatgaggttcaggtacagtttgcagaggatgatccccagcagcaggtatcccaggtagaaaactgtgtagcacagggctttgactgtctggtgatcgcagcagttgactccggtgtgcttgtaaatgcagaggctcaggcaaaggatgctggaatccccatcattgcttatgaccgtctgttaatggaaactgacgcggtttcttattacgcaaccttcgacaacagaggtgttggtaaagtaatcggccagtatatcaaagacgcaaaagatctggacgcagcccgtgaagcaggtgagtcctataccatcgaattcttcatgggatctccggacgataacaacgcattattcctgtacaatggtgttatggatattcttcaggaatacctggatgacggaactttagtgtgcaaatcaggaagaacctcctttgaaaagacctgtatcttaagatggtctcaggaaaccgcacaggctaactgtgagaacattctgaccgctaactatgcagatgagaagcttgacattgcatgttccgcatacgatggtttcgcttatggtatcaaggcagctcttctgggcgctggatatgaagttggttctgaagaatggcctctgatcactggtcaggactctgacgtaatggctgttaagaacatcatcgaaggttctcagacaatgtccatttacaaagatacccgtctcttagctgacaagtgtgcaaccatggtggatgccgttcttcagggaacagatccggagatcaatgatgaagagcagtatgataacggtaagctggttgttcctacctatatgtgtgacccagttgcagttgacaaagacaactacaaagaactgttagttgacagtggttactatacagaagatcagattcagtcagccggatcagacgctgaataaattaagaattggtaactcattggcggcggcgttaaccgccgccatatttatgaaaaattttgaggaaaaggagtgagaagcgaaatgtctgaagtaattctggaaatgaaccacattacgaaagcattctcaggcgtcaaggcattggatgatgtaaacctgaaggtagaaaaaggcgaaatccatgcgctgtgtggtgaaaacggtgcaggcaagtccactctgatgaatgttctgtccggtgtctatccctatggaacctatgaaggcgacattatttataagggtgagaaatgccaattccataagatcaaagacagtgaagccaagggaatcgttatcatccatcaggagctggccctgagcccatatctgtctgttgcagagaacgtgttcatgggaaatgaacagacaaccatgagaggcgtcatcaattggaccgcaacccgcagcaaggcaaaagaagcccttgcccatgtgggacttgagaatgaagacattaatgcacccattaactctttaggtgtaggaaagcagcagttaattgaaattgccaaggctatggccaaaaatgtagatcttctgatcctggacgagcctacggcagcattaaatgatgaagaatccgcccagcttctggagattatgctggagctgaagaaaaagggcgttacctgtattattatttcccataagttaaatgagattagttatgtggctgactccatcacggttatccgtgacggaaagaccattgagaccttgaaaaaaggtgtggatgagtttaccgaggatcgtattatcaagggaatggtaggccgtgagctgaccaatcgttatccggtccgggagaactgtcccatcggagatgtgattctggaagtaaaggactggaatgtttatcatcctgagatggcagataaacaggttcttaaaaatattaatatgaaagtccgggccggtgaggttgtaggtctggctggtctgatgggtgcgggacgtacagagtttgccatgagtctgttcggccattcctacggccagaaaatttctggtgaggtttatatgcatggcaaaaaggtaagcaccaagactgtgcgggaagccattgccaacaagatcgcatatacttctgaggaccgtaaaacctacggcctggtgctgatcgatgatatcaagcacaacatgaccatggcagctatgcgggaatatttctccggaaaaggcggcatcgtaaacaaaaacgaagaaattttggccgctgaggaatataagaaacgtatcaatgtaaaagcaacctccattaaccagaccgtaggttctctttccggcggtaaccagcagaaggtggttcttgccaaatggatgctcacccagccggatgttctgatcctggacgaacccacccgtggtattgacgttggtgcaaaatatgagatctattgtgtaattaatgagctggcaaaggctggcaaggcggttattgtcatttcttccgaaatgcctgaggtcatcggtacctgtgacagggtttatgtgatcaacgaaggtgagatcgccggtgagctgaataaggacgagctttcacaggaaggcattatgaaatgtattatgtcacataacagcgggaaaggagaagtataagaatggaacagaaaaagaaatatgtgaatatagacctgaaatcctatggtatggtcgcagcactgattttaatttttgcacttttctacatattatcaaaaggagccaatgcgtctccaattaatattaacaacttgatcatgcagaatggctatattgtcatcctggcaaccggtatgcttctgtgtgtattgactggtaacatcgacctgggtgttgggtctgtggtagctttgtgtgcggcttctgccggaaaactggttatggaacagaaatggccggttgctctggcatggctggtggctatcggtatcggttttgcagtaggcttgtttgcagccttctttattgcttacctgaacatcccgccattcgtagtgactctggcaaccatgcttatgggccgtggtcttacctataccatgctggcatcccagacagtaggtcctctgccggaaagctacaccaagatcggcgcaggcttccttcctgcctttaaaacaggcgacggcggaattgatatcctgtgcattgttgtggccattgtagccacagccctgattctttttgcagagtttaaacatattcagacaaacaacaaatatggatttgccaatgtggttccgtggcagatggctgttaaaaacgtggtgatcattgccattgtatggttcttctttatcagccttggaagaaacaagggtatccccatccagcttgtagttatgggtgtgatcgttgctatttatcagttccttaccagccagactgtggccggccgtcagatctatgcattgggcggcaatgcaaaggcagccagcctgtccggtattaatacaaagagagtatttttctggatttatgtaaatatgggcgttctgtccgcagttgcaggtattattctttccgcacgtcagggcgctgcaaacccgaagatgggcgacggtgttgagctggatgccattggttcctgttatatcggtggtgcagccgcagcgggcggtgttggtacagttgtgggcgctgtcgttggtgccttcgtaatgggtattctgaacaatggtatgtctctgatcggtctgcccacagacttccagaaggtggtaaaaggtgcggttcttcttggggccgtgacacttgatgtattgacaaaaagaaataaataatatttgagcggatgtcccgtttgtggtatagtaagtaagttgcagaaaagaggtgagggcatggctaagaaaccaaaatataaccaggtggtggaatgggtggtggatctgatcaccagaaaggaactgctgcctggggataagctggaatcagaaatggatatcagtaccagatttggcgtgagccgccagacggtccgccatgccctcagtattttgtccaaacagggattgattgaatcccgccagggaagcggaagctatgtgagggaatcagaggatattcccgccaggaatacccattccaggaccattgtcattgtgagcacctatgtgaatggctatatttttcccagtgtcattcaggggatggagcgggtactggaaaaggatgactggaatatacagatcatgtttacctacaacagcagggagacagagaagaagatcctgaaaaagcttttggaggacatggagctggcggggctgatcattgagcccaccatgagcggcctgcccaatcccaataaaaaatactatgaacggatcctgaagatgggaattcctgtgctgtttttccacagcttttatcctgccctggatatccctcatgtttccttaaatgacgaggcaacaggaaagctggcagtggagtatctgctttctcaggggcataccaggatcggcgggatctttaagctggacgacggccagggtctgttaagataccagggatatctgaaagccatgtttgatgccaaggttgaccagaaggaaaaatatgtgacctggatcgatacagaggaccagcatcatatggagctgtgccgggaaaaaattttgagaaggcttcaaaaatgtacggcctgcgtgtgctacaatgacgaggtggcccatgacctgacagaaatttgtcagcaggctggggtgcgcatacctgaggatctgtccattgtaagcattgacaattctgagcttgccaggctgaaccaggtacctcttacttctgtacgccatcctatggagaagctgggagttaaggtggcggaaaatatgctgcagctcatctataatcccaatttccaggcaacctatgaatttgaaccccagattgagatccgggaatctgtgagaatgtgtaaaacggaagaagaataaaaccagccgttacaaaacataccccctgcaggaaaaagaggtaagttttgtaacggctggtttttggttggatatggttaaagtccctggaatgacgttgcggatgagcaggcctgcctgcagcttctcaacgtcattccggggataaatttttatatggttcagcagatctctgcccctgcaggcatgtctttttctggagtcaccagggccagattgccctctgcatcctctgcacacaggatcattccttcgctgagaaccccggccagtttggcgggctttaagtttaccaggaccatgacctttttgcctaccatttcttccgggctgtagtgggccttgatcccagatacgatctggcgcacctgactgccgatctttaccttggagcacagaagcttccgggatttgggaacggcctcacaggcaatgatctctcccacctggaactgcagctttccaaaatcctcaaaggtgatctctgcctttggttccacatccatcacgttttcctcctgggctggagcttcctgtacgggaggatgaagttcctctaccttggccagaacttcctttacatccagacgggcaaagaggatttccggtttgtctgtgaccttctgtccattgggatacagaccgaagatttccaggtcctcaagggagcgtttggaggcatttaactgggccaggatcctttctgtggtgtccggcataaaggattccagaagcgtggcaccaatgcagattccctctaccagattgtagagaacagttgccaggcggtctttcttggattcatctttggcaagggcccagggcatggtctcgtcaatatatttgttgcaccgcttgaacaaagaaaacacctcggtgatggcatcggccacacggagcttctccattttggcagcaactttttttggcacttccagagcgaaggcttttaattcttcatctacaggctctgtggttcctggattggacaccacaccgccgaagtatttgttggacatggagatggtgcggtttaccagattgcccagggtgttggccagctcggagttgagacgctccaccatcagctcccaggtgataacgccgtcgttctcaaagggcatttcatgaagaacgaagtagcgcacggcatccacgccgaagaagtccaccagctcatctgcatagagaacatttcccttggatttgctcatctttccgtctccctgaagcagccagggatggccgaatacctgctttggcagcggcagatccagagacataaggaaaatcggccagtagatggtgtggaaacggataatgtcctttccgatcagatgaaggtctgcaggccagttcttattgaacatctcggtgctctccccgtcgcagtcataaccaataccagtgatatagttggtgagggcatccagccatacatagaccacatgcttgggatcaaagtccaccgggatcccccatttaaaggaggtacgggatacacacagatcctgaaggccggggaggaggaagttgttcatcatctcgtttttcctggattccggctggataaattctgggtgggtgttaatgtgctggatgagccggtctgcatatttgctcattttaaagaaataggcctcttccttggcaggaatacaggggcggccgcagtccggacattttccgtccacaagctgggactctgtaaagaaggactcgcagggtgtacagtacattccttcataatagcctttgtaaatgtctcctttggcatacattttcttaaagatcttctttacctgttcttcatggtctttgtcagtggtgcggatgaatttatcgtatgaggtgttcatcaggtcccagatattgcggatctcaccggctaccttgtccacatattccttgggggtaacgccggcttcctgggcttttgtctcgattttctgtccgtgctcgtctgtgccggtctggaaaaatacgtcatagccctgctgtcttttaaaacgggcaatggaatctgccagcactgcttcataggtgttgccaatgtggggctttcctgaagtataggcaatggctgttgtaatgtaatacttctgtttgtccatggtttttattcctcctgaatttttaagatcactggaaaaagaatttggcctggcaggattctctgcctgggtggagccgcattggcggcataataaaacccgccttctctgtcctgagaagacgggcattttccccgtgttaccacttctgttcgcctctgtctcgcggcagaagccttatggagtaccagcatactcccacgctataacaggcgtacctgtcgcagcctaatgtgcagttacacactcggtgcgcctctcagaagccattttccacataccgcagtcacattcctctcagcgccgggatgtaaatccctggaatttctctgtaatgctgcatatacatgtactctcttcgtcacagtgtttactcatatataaggaaatagtagcatattttctaatgtttgtaaacctgaaaaattccgtggaaaaactgggtaaaaagcacggaaaaaataaaaggaaaatattttcaaaataaatattgacaaaaatggttcaatatcatataatacaaacaacagtaattgttactgttattaaaaaaagaaaggagaggaattatggcaaacctgaaatacagccgacaaagagagtccataagggagtttcttgtaaccaggaaagatcatcccacggcagatattgtctatgacaatatgaaactgatctatcccaatataagccttggaacggtctaccgtaatttgtcactccttacaagtcttggacaaatcaagaagctggccaacgtgaatggggtagaccattttgatggcaggacggatcagcacaaccatttcttctgcaccaaatgcggcaaggtggaggatctggagatggagagcattgatcacatccaagaggccgcatccaggaactttactggtgagatacaagggtatacagcaaggttcttcggactctgtgaagattgtgtgaatcaagaaaaaatggaaaaatctacttgacaagtccagataaatatggtaaattaaaatagtaatcgttatcattattaagtttgacacaaggtaacaaatcttttcaaatgaaaaggttttacatataactcaaaaacaataatataaaataaagaaaaggagaatttaacaatggcaaaatgggtatgtaacgtatgtggatatgttcacgagggagaaactgcaccggaggtatgtccgatctgtaaagcaccggctgagaaatttacaaaacaggctgagggaatgacctgggcagcagagcatgttgtaggtgtagcaaaaggcgtaagcgaagacattctggctgacttaagagcaaactttgaaggagagtgctctgaggttggtatgtatctggcaatggcaagagttgcccatagagaaggatatccggagatcggattatactgggagaaagctgcttatgaagaagcagaacatgctgcaaaatttgctgagttattaggcgaagtagtaactgacagcactaagaagaatctggaaatgcgtgtagcagctgagaacggtgctacagcaggaaaatttgatctggcaaaacgtgcaaaagctgcaaacctggatgcaattcatgacactgttcatgaaatggcaagagacgaagcccgtcatggaaaagcttttgaaggtttactgaagagatacttcggctaatcacaagccagtcatgatacttccaattcattaagaaaaggaacaggtaaagctattgagagacttggaagctgccttccaagtctcttttttcagaaataataataccaaataatgtaagaaaagggaggatttacaacatgtccaaatacgcaggaaccaaaactgagaaaaatttgtgggatgcatttgcaggagaatcacaggccagaaataaatatacctattatgcttctgcagcaaaaaaagcaggctacgagcagcttgcagccttatatctggagaccgcagaccaggaaaaagagcatgccaaaatgtggtttaaagagatccatggcatcggtgatattgaagcaaacctggaggatgcggcagcaggtgaaaagtttgagtggaccgatatgtatgcccgtatggccagagaagcaagagaagaaggctttgaagagctggctgtgaaatttgaaggtgtggcaagagtagaggcagcccatgaggcacgctacaataagcttctggagtcctacaaggcaggcaagaccttcaagggagatgctcctttaggctggaaatgcagaaactgtggttatgttcatgcagcagaggaagctcctgaagtatgtccggtatgtgcacatcccaaagcatattttgagagaaaagtagaaaactattaatttccagggaacaagctcctgttgaccaataagattgtgaacccaaaactgctttcatggaaaaataaattttaccccttgacattttttccttataggccttatagttatagataataaaggggagtagctggcactggaaggtgtttgcgatgtcgtcaatctcgacagatcaaagtctgtccgtatcgtgatgaaacagcgagacttttattgcatacatgcaataaaagcctcgctttttttgcataataataaacgaaaggatggtcttttatatgaaagcttattacaaccagacctcttcggaggtgcgggagcaggtcaatggaagcagcaagcctctcacccaggagcaggtgaaggcaaaccaggaaaagtatggaatgaatgaactagcggagggaaagaagaaaagtgtcctttggatctttctggaacaatttaaggattttctggtgataatcctgatttgttcagcgattatctctatgtttctgggagagaaggagagcgccattgtaatccttgtggtcatcaccatgaatgccattttaggtacggttcagaccgtcaaggcggaacactccttgaacagtctgaagcagttgtcagcccccaatgccaaggttttgcgaaacggcattgttgtggagatccccagccgtgaggtgacggtgggagacgaggtgtacctggaagcaggagacagcattgtagcagacggaaggcttctggaaagtgccagcctgaaggtggaggagagtgccctcacgggtgaaagcctgggagtggataaggtgacagagcctttggaaggtacacttcctctgggagacagaaaaaatatggtgttctccggaagctttgtgtcctacggcagaggcgcctttctggtgacggacattggcatgaacacagaggtgggcaagatagccggacttctgaaaaatacatcagagaagaaaacccctcttcaggaaaacctggatcagtttggcagaaagctgtctgtgatcattctggtgctctgcgccgtactctttggcattcaggtgtttaaaggcggcaacacggcagacgctttcctgttcgccgtggccctggccgtggcggctatcccggaggctctcagctccatcgtgaccattgtgctggccttcggaacccagaaaatggccaaggaaggggcgattatccgcaagcttcaagcagtggagggactgggaagcgtatctgtgatatgttctgataagacaggaaccctcacccagaacaaaatgacagtggagcactattttgcagatggccaggatgtgccggcagatcagatcgacccgtccaatccccttcacaagcagatgctccgtttgagtatcttgtgcaacgactccaccaacattgacggccaggagatcggcgaccctacagagacggctctgatcaatctgggagaccgggtgggtgttcctgcccagcgagtgagaaaggcttatccgagaatttgtgagctgccctttgacagtgacaggaagctcatgtccactttccataagctgaaggacggttacaccatgatcaccaagggagccacggacgttatgctggagcgggtggcttatatacaagaaaatagttctcccaggcctatcaccaaggaagacaaagagaagattgctgcagccaacacgcaatattccagccagggccttcgcgttctgggagtgtcctataagaagtttgacagggaagtccggctggggctggaggatgaatgtgaattaaccttcctgggccttatcgccatgatggatcctcccagagcagagagtgcggcggcggttgcggactgtaaaagcgccgggattaagcctattatgatcacaggggaccataaggtgacagcggcagccattgccaagcggatcggaattttggaaaatctggacgaggcctgtgaaggctcagccattgatggtctctctgatgaggagctgaaagagtttgtggtagacaaatccgtgtatgcccgtgtgtccccggaacataagatccgcattgtccgtgcctggcaggagaagggaaatattgtggcaatgaccggagacggggtgaacgatgctcctgctctgaaacaggcggacattggcgttgccatggggatcaccggcacggaggtgtcaaaggatgcagcgtctatggtactgacggatgacaattttgccaccattatcaaggcggtggaaaacggaagaaacgtgtatgccaatatcaagcgttccatccagttccttctgtctggaaattttgcagcgatcttggtggttctgctggcctcactggcgggacttccggtaccctttgcagccgtgcatctgttgttcatcaacctgctcacggacagcctgcctgccatcgccctggggctggagcctcacaaccatgaggtgatgaaggaaaaaccccgtcctatgcacgagtccattctcaccaaggagtttttggcaaacattggagtggagggagcggtgatcgccgccatgaccatggctgcctttgttctgggctatcacagcggaaacgcccgtctggctagcaccatggcttttggaaccctgtgtctgtccaggcttgttcacggctacaactgtaaggccagaaaaccggtgctgtttacaaaacggtttttcaacaacaaggccatgcagggagccttcctgggagggtttgtgtgtctgaacgccgtgctcttgatcccggcccttcaggggatcttctctgtgcagacgctggaattgtcccagcttctcactgtgtacgggctggcctttgcaaacctgcctatcattcagctattgaaaaaaatcaggaaataagaacgtggaaaatctccccggtttcagggcccaagggtccggccggggagattttttcgcggaaatattcctcctggattctccttctggcattccttgacgttttctgtggaagcacctataatgttttatataaaaccgtatggacagattctaagaacaggcaagaaaaggagaaccacggatatgaacggaggctttacgcattttgatgagaaggggaacgcagttatggtggatgtatccgggaaggctgtcacagcccgcacggccaccgctgttggaagcattcgtgtgggagaagagattctcaaagcaattcaggagcagacggtaaaaaagggagatgtgctgggggtagcccgtgtggcaggaattatgggagtgaagagaacctcagagctgatacccatgtgccatccccttccggtgaccaagtgcggcgtggattttgaaatcctggaaaaaacaggggagatccgggttttctgtaccgtgaagacagagggaaagaccggggtggagatggaggccctcacaggggtccaggtggctctgctgaccatatatgatatgtgcaaggccatagataagcggatggtgatgactcagatccatttggtggagaaaacaggaggaaagagcggacagttccgctttgatgaagtatgatagattcttacggaagaaagattgactatttgcgggtgtcggtgacggaccggtgcaatctgcggtgtgtgtactgtatgcctgagcatgggatccagccagttcccaagtcccagatcctggatgaagaggagattttacggatctgctctgccatggcccagcttggaatcagcaaaattaagatcacagggggagaacctttggtgagacggggaattccctccctgattggacatttaaaggaaattccgggcattgagaaagtgactctcaccaccaacggagtagctctggcagagcagatgaaggagctgacggcagcggggctggacggcctgaacattagtctggataccctcaatcctcaggcctaccagaccattaccaggagaagtctctatgaccatacctggcgtggagtggaggcagctctggcctatcctgagatccctctgaaaattaattgtgtgccgttgggacttgccaaccaggatctgtgtcagatcgcagggctggccagggatcacagaatccatgtgcggtttattgaaatgatgcccattggactgggcagggaatttcaggggcagaaggaagaagagatcgtggaattgctggaaaaagagtatggaccgttaaagccctaccagggggagcggctgggaaatggtccctgtcattattatacagcccaggggtttaagggacatttgggctttatcagtgccatcagccacaaattctgcagccggtgtaaccggatccggcttacctcccagggctatttgaaaacctgtcttcaatatacagcagggagggatttaagagaaatacttagagacggtggtactcaggaagagctgaaggcggccatactggccgctgtggaggaaaagcctgtgggccatgcctttttggaaaaaagaaaggacgacaatacagagagtctgtgtatgtcgcagataggaggatgatatatcatgaagcgagcagcgatccttacatccagtgacagcgggtaccggggagaacgacaggatctgagcggtccggtgatccgggaaatcctggagaaggcaggctatgaggtggtgtccatggacctgcttcccgatgaccgggaaatgctctctgccagaatggcggaaatagcggatgaaaatttggcagaactgatccttacaaccggaggcactggattttctcccagagatgtgatgccagaggctacagaggctgtgatcgagcgcagggtgccgggaatccctgaggccatccgcagctacagcctgacgattaccaagcgggccatgttgagcagggccacggcgggaatccggaagagcacattgatcgtgaaccttccgggaagccccaaggctgtccgggaaagtctggactatatcattgataccctggagcatggaattgagattatgaccggagaagcctcaaactgcgccaggaaataaagattgagaataggaggagttcgattatggggaaggtgatcgccgtttgcagaagcgagaaaaaaggcacccagaaggaaaatatccatgagggagtgttcattgaagactggggtctggaaaaggatgcccacgcaggaaaatggcaccgacaggtaagccttctttcctacgataaaatccaggccttccgggccaggggagcggaggtgtccgatggagcctttggagaaaatctggtggtggaaggaattgattttgccagccttgccctgggaaccagattcagatgcggggatgtgcttctggagctgacccagattggaaaggaatgccacagcggctgtgagatctttaagaaaatgggagagtgcatcatgcccagggaaggggtctttacaaaagtgcttcacgggggtgtgatccgtgaaggagataaattggagattgtggaggaaccggctgtatgactttgatatttgatacccatgcccactacgatgacgatgcctttgaccaggacagagaggaggtgctggcctccctcagagagggcggcgtgggagatgttgtgaatgcctgcgcttccctggagcatatggacagaaccgtggaactcatggaaacgtatccctttctctacggggctattggagtgcatcccgatgacgctcatcttatgagccaggaggccctggacaagatccggcgcctttgccgccatgaaaaggcggtggccattggggagatcggtttggattattattggcataaagaagaggaagagcatgagcggcagaaggtatggttccgggtccagatggagatcgccagggaggagaagctgccctttatgatccatagccgggatgcggcccaggacaccctgtgtgtgatgaaagagctgggtgccggagatatgtacggcgggatcctccactgcttttcctatgggaaggaaatggccagagaatatctgaatatgggactttatctggggatcggcggtgtagtcacctttaaaaacggccgcaagctgaaggaagtggtggaatatgcacccttagaacagcttgtactggaaacagactgtccctacctgtccccagagcccttcagaggaaaacgaaatacatcgttgaatctcacctatgtggcggaggctgtggcccagatcaagggcatagagccagagaccgtgatccaggccacaaccgagaatgcaaggaagctgcttgccatagggcagaattctggcagataaaaacttctaattggaagaaacaaagggacaaggtttattggcaaactagacaaccttacaagaagaagcataattattctggatattggaattaaattaaagtataatagaagaataaatttcgtctttttccggcagcagttccctgcggggacagagggagtctttgaggctggagagagcaaggattgaaaatgcccaggaaatccgggaggtatgtatggaaatacttggatggtttgtatttattctctttgttttgctatcaatccttcttttagccggaaagggttcctttcttattgcgggatataatacggccagtgagaaggagaaagcccggtatgataaaaagaagctgtgcagggtcacgggagcgggcttttcctgtataacattgcttcttggggtgaacctgtattacgatgaggatctgccttccgtgatgacgtggataacccccttggggatcatcctgtctatccttttcataattattgccagcaataccatctgcaggtgcaaggagattcctgcggcagcgccggatgctgcttctgagaaggaatccggaaaaaaaggggtgataagatctcttgtgatcaccggagttgtgggaatcgctgttttggtgcttcttgtgacaggatctgtgaaatgcgtgattgacaaggacagcctggacatacaggtgacttattgggcagacacctcaattccttatgagacaatggaatctgtggagtacacagatgatctgaatgtgggagcccggacttccggcctgggaaattttaaggtgagggccggacgctttaacaaccataaattcggagcctatcgtctgtattcttatgcaaaatgcaaagaatacgtgattatccatacaaaagaagaagttgtagcagtgaatttggagacaccacaggagacgcaagcactttaccagaagctcctggggaagataggctgacggaaacttataaagatggtctaaggaaaagcggggaaattggaatgctgaaattagaaaaagccagattaagacacatgtacaccattttggaatccatcagacaggcgcgggaatacctggacaggatgggcgttgaccagtggcaggagggatatccggatgctgcctgtatcggagaggatatccaggagggctgcggatattttattgacctggatgaaaagattgccggctatatctgcgtggatttcagaggagaggcggcatatgagaagatagaaggccaatggctcagtgaaggcgcctacggggtcattcaccgcctggctattgatgatgctttccggggcatgggtctgacagggcaggtgttcgctcttgtggaggagctgtgccggaagcggcaggtttacagcatcaaggtggatacccatgaggaaaaccataccatgcgtcacgtgctggaaaaaaacgggttcaagaactgtgggatcgtccattatgaggatggagtccgggtggcctacgagaagctcctgcagcctgtagatgaaacataagctacttaacaaagggtgcctgaaaattcaagtaccctttatttttttgcataggaaagttgggggaactttcctatgcagcaaaatttcatttacccaggaataaggcggcatttttggagaaattgctgatgtattcagcagcgcccttccagtcccggcggtccaggtatttctggggaaggagagctccggcgattcccacgcctacatagccgttattgaagaattccttcatgttttccagctttacccctcccacggccacaaagtctgcctcctggaagggacccttcaggctttttacatagcggtagggcatatcccctgcgggaaacagcttcataatggaaaagccgtacctaaggcacaggtctacctctgagggggtgagtacacctggaaggagttttaaattctgctcctggtaatagcttaataaatcttcggaaatggatggggtgaggaagaactgggcgcctgcactgcgggcagcctggatccgctccttattgatggccgttcccgctcctacacaaacctcctccccgaaggttttcttaattctttcaatctggcttgcgccgtcaggcgtgttcatggccacttctatggcgtgaatccctccttttaaaatactttccacatagggaagaagaatctgggaatccacattgcgcaggattgcaatgacaggatttttttcaataatagttctcatagcttgtctcctttttgttctgctgtgtttccagtgtccgggatcaatgtgcgggatcagtgtccgggatcagtatcccgggcattggcagccatatgttttaccggaagatctcttctttgttgccaagaatattctgaagggtgcgcctgtcgggaaacccttcaatatctccagtggtctgagtgcatagggctccgcagatccctgcgtattgtccgcaggtgtacagatcctttccttccagataaccagccagaaatccggagttgaatgcatccccggctcctatggggtccacgcaggtgcaggggaagggaggaatctgataaccctcgtctttgctgtatacataggcgccccttccgccgtccttgaatgccagataggacacatcactttttgaaaaaatcaggtcccgcagcttgtccggctggcttacagagaaaagacattctgcctcttcttttccaataaacacaaaagtagaagcaaatatgaattctttcatcaattgggtataatcatgatccttccataattttctccgtatattgggatcaaagctcacggagatcttccgttttctggcaatggatacggcttttctcacagtctccttacaggaatcgctgagtacaggggtaatgcctgtgaaatggaaaattttcgtctggtccagcagggaatcctgaaaatcctctggacataaatgggaaaaggcggagctgctccgataataaaagaccttggtctcctgggcagtggtgaattctttaatcatcactcccgtggaatggctggggtctctttttacgttatgggtaagaacaccctctgcccggatcatgttttctatgtattgtcccggctcgtcctcccccagactgctgaaccattctgcactgtggccaagcttgcataggcctatggcggtgttgctctctgcgcctgcaatatagctggtgtaagaacggttatagcgcaggggtcccgggtggtcaggggcgaagttcatcatagtctctccaagagtaaatacttctgccatggtagtgcctccttctctggcaaaaaatcaaggtgtgttaaaagtaactgggattttcgtaaagggtgggtttcaaataaccgaaacggctggaaatctccttggcggcccgggtgatcagttcgctgtagaagtcctgcttttcaagagtggcaggagtatagacacaggaaatacttatggctgccagacagttcccggaagcgtccaaaatagggcaggcaacacaatatacataatcattgtccactagtgtgaatatttataatcacttcaagatttttcctttgacgaagctatttctataaaatcaatcataccatagaatgggagaatttgaaattcttattattcgtattttcggatgaagtttccaaaacagaagtatttattcggaaaaataaatatgtgttcgtattttcgaatttggagcgggagaaagaagattcaggggcatgattggagagaagaaagacccccagatgaaaatagatagaaaaattatttttttaaaattagtctcctcttttgttggatttttcgttataaatattaaagggataaaataatagcagacttacaaaaatttatgggcaggtataattaaggattaatattagatacctattaaagcatttttcataaaaaagaggtaaagcatgagttcggatgaacaattgattcaaagaatgagaaaaggtgatgagtttgccatcgaagaatttgtaagaaagtattatccaacgataatgacatactgtagaaaaagggtgcaagactataatttggcggaagatttaacccaggagacgtttgaacattttttttgcagtttctcacattacaaacattatgggaaaatcaaaaattatctgtatacaatagcaggaaatttgtgcaaagacatttatagaaccaccaatggggaaattcccatggatgaagcagatatgatagcggatggtttcgcgttgaaggtcagagaaaacagtcatttatcatatgatacgatggttggcgttgaagaacaaatggatatgaagagggcgttggataagcttccggaagtttatcgggaggtgatgatcttgcatttttttcgtgacttgaagcagactgaaattgcaggaatcttaaatatcaggatacatattgttaaatatcgcataaaaaaaggaaaaaagcttttacaagaaatattgaaggaagggattttatgacagagcagggactgagagaagaacatatcaaagagacaattaagctgtctaaacaggcattttataaaggtttagaagccgaggaacgtacatggtcccagttcctgatcggacagttacgatttgtacggaaacgctggtggttttttcaatttatcctattagtgtttttgtggggaggcatgtacttgggagacagtgaaccggcatttcaacggcaggccgctgttctgatgccgatgtttggtttattgattgtacctgaactatggaaaaatgtacgtaacaattctatagaagtagaaaatgtggcatgttttacaatgcggcagatatatgcggccagattaacaatgttttctttaatagatttgttgttgttgactgtgttctttacagcgaccacagtgaccattcatttgacattacttgatatcattattcattttctaatcccattgaacataacggtatgtatttgtcttggagtattgtgtgtgcggcgttttcattcagagtatgtagcaattggtttttgcatcatatgggcaggtgtctggtatcggattatcagtgatgagcagctttatcgtgcgatatcaggaatggtatgggttggacttgtttttcttacttttttaggggtattgctgttggcaaaacaacttttaaaaaccagtcagggatattcgggggattatttattatggaattagcgatagagaacttaaccaaaaagtataaggatgtaacggctgtgaatcagctaaattatgtgatgtccaacggcgtatatggactgcttggttcgaatggtgctggaaaaaccacattaatgaggatgatttgtactttgataaaaccggacagtggacgtattctttgcgatggggaggacattctgcagatggataaagcttaccgccgtcttttaggatatttgccacaggagtttgggttttatcctgattttacagccgaggattatatgttatacattgcttccatcaaagatatacatcccgccttggccagaaaacggaccggagatctgcttgcacaggtgggaatggagaggtatcggaaaaagaaaatgaagaggttttccggtggaatgaaacggcggataggaattgcccaggcaatgttgaatgatccgaagattttggttttggatgagcctacagccggactagatcccaatgagcgtatccgtctgcggaatcttttaagcgagttatctcgcgatcgattggtgttgctttcaacacatatagtatcggatgtggagtatattgccagtgaaattatgctgatgaaggagggacgtattgaagacgctgggacagctgctcagttgattggcacaatgcctgaacaagtatatttgtgcatggtgccggaaaatcaggtaggaaattatcttaagaaataccgtgtagcgaatgtaagaactacagcaggaggggcagaattacggatattggccagggaggcgcctgtatctggagcaagaatggtgcagacgaccttagaggatgtatttctatatcactttggacaaggggatgatggaaatggtgcgttttgaattgaaaaaagtattctcaaagatgagtagtaaaattgcgttgctgttacttctagtgtttgctgcctattcagtcagtaatgcaaattatttggtatggctgaatgaggataatacagaggtgactggtagggcggctgcaaaaaaacttcgtgaggcggagaaggaattgtatggtccattaactaccaagaagatagaagatgtgatttcccagaagtggagccagggaaatagaggaatccgcatattgcttgcaagagcatttggaggacttgataatacagattctactatagtagacacgttatcggctgaggacgcggcggatttctatagtaatcggctaagcagattaaaggaatggctagaagcccagggaagctggtatacagaaaaggaaaaagaatatctgacagcacagtatgagaaaatggagatacctcttgactatgaatatgcaaaaggatgggcacaattgttttcaacagtatcaaatcttcagatgtttcttttgcttgtgattggatttctggcagcaggaatattttctgaggaatatcggacgggagctaactctatatttttttccactgctcttggacgggaaaaggctgtcaaagcgaaaataaaagcgggactttttttgataacagcagtgtattggctgacctttgctgtgttttccattggggtcctgtttgaattaggtgccggaggagctgactgtatgatccagattagcagtcagggatggaaaagcatttataacattactttttttcaagaatatttgctaattgcggctgcaggatatgtgggatgtttattcgtgaattcctttgccatgcttgtgtctgcaaagacaaaatctaccgttgtgtcagtgattgttccttttgttgttctttttgcaccaacagtcataaagtttggaaattcccgaatcgcagaaaaaattgacggtcttatgccatatcaacttgtacagatgaattctgcaatctgtgagttttatttttatgaaataatgggcacagtagtgggagcggttgaaatcctgctggtattatactctatattcgttgtagtcttgcaatccggcatatatagagtatttcgcagaggggaagggtaatacatgatgaaaaaattactgggaaggtacaaagagattcataggattaaacataacgttgtatataactaaggttggtatttgtgaattttcataaatttttggcgtacaaaagggctgaagcacgattctagtgcgacagcccgtttgacttttaataactgtagaaattcccgctggcgtcatagtatccgttggcggtgaacacatttccgtaagggtcgtaatagttgccgttggtatcataataaccgccgttggcatcgtaggtattgccgttggcgtcagtggttccggaatggctgccgttttgtgtggttccgtctccctgggtgccttggtttccgtcgatttgatccgtggcggtggagggtgtcacattggtagacataatttcgtcaaaggtctgttgaaggctgctcactgtaaattcctggtctgtgaggctggcggtgatggaattctgtgaggccaggtcgtcggtgtagtctttcagaaggtaggggccgtagctccctgtggcataggaataatgcatgatcgtgggctcaacggttttttctttaatggaaatggacacgttggtgccctgaacggttttctctattgtaaatttggccattccgcccagaaggcccgaaggagtttcctggatgcctacaaagttgcccagagaatagaaaacagtggtctcattgccgttctcatcgttcatggtgccaaagggctggacagacatgggatgggtaccgatgatcacattgacgcccagactcatcagataagaagcccattgtttctggtattcgtttggtacggaggaggtctcatcgccccagtgggcattaaagataatgcagtcactttgttccctggctttgttcactgcagcggtgacctgttctttttcaaaggtgtcaagcatataggcttcttctgaggagagggcattgttcctggtgccgtaggtgtagttcagaagggcaatgcggatatcatttacgtttaccacctgtatggtggcggcgtgatcctgggtatcgtgaatacccagaacaggaatgtccgaatgacggtttttccagatgtttaaggtctcggtgatgtattgggagccgaagtcatccgcatggcagcttgcggaagcgatcacatcaaaaccagtatttaccagagcatcgcttacttctgcaggggacaggtaggtgggatagccgctgagctgggaacggtctgtggtcataacggtggtctgtgccacaagagccaggtcagcggcttcgatctctgatttcacattttgataaatgaaatcgtagctgtagctgccatcgctgttctggcctgactcgtacaaggtggagtcaaaaatgttattccccacagctacaaccgtagcagtggtgacagaagactgggctgctattttttcctctttttcttttgccttctgagcctctttttgggcctgtatcaccggtttatcaataagggtataatccacctgatgaatgacaatgctaataaggaaaagcgccgcaacggaacacagcagactgactctggagcggtttttctcagttatattcagtggtaaattttcacgattcataatagtgttttccttttttgtgatgagttaacaagtatgaaataagtataccaaaaaaaacttgacaaagaaagattttattagaaaaaatactttgaaaaccaaactaaatggtgtataatgaagaatagttaggagcgcgtagcagcgagtaactattcgctactgattgaccaagggtcaagcaggtaccgcaaggtagctaggagcgcgtagcagcgagtaactattcgctactgattgaccaagggtcaagcaggtaccgcaaggtagttaggagcgcgtagtcataatcgtgttttttatggagggagaggtggctaatggatagttatgagatcatcaaccgggttttggtgaagttgttcaatgagattctggatgcggaggagaacgctctgaccgcctcggagtataaggatatatctgtgaatgatatgcatatcctggaagcgatcggggtggatgagcccaagaatatgtcctgcgtggcacggactctgtcggtgaccgtgggaaccctgaccattgccatcaacaacctggtgaagaagggatacgtgacccgggtgcgcagtgaggaggacagaagagtagtcctcatttccttgtccagaaagggccagggggcctatctccatcatcagaagttccatgaggatatggtccgggagatcatggcagacttaacccctcaggaagcccaggtactttccagtgccctggagaaggttacgggattttttgaaaaatataaataattttcacatacccgccccgtgagcacgtctgttcacacacagggcagatatagaaaagcagcagagcagtccttattaaacaaggagtgttctgctgcttttccctttaataggcatccagatatttttccaagatgggaaaggccacgggaccgatctccaggaccttccggtgaaaatcctttaggtcaaagtcttcccccagcttctgcctggcctttttctgcaggtctgcaaagcttaaatatccccagtagtatctgagatagttgccgggagtttcgataatatattgaaaaatctcctttatgacagcctggtctgtgatcccaaagatggataaatattttgtcacggcagccaggttccatccccggtaatggattccgatatccagaagagagtacaggcacagatttacggagcggttcagccacactgcccgggccacctccttgtctgcagaggaatatccgtaggcaaaggactcaatgtaggtggcccagccctcgatatatcctccgcttgtgatgagctggcggatctcacaggggttggtgcggctgaaatactgggtttgatacagatggccggggaacccttcgtgggccagggtggcaaacagctccaggtccgtggtgttgctccccccattgatgtaaatagtgttgggataatgggtatcgatgggaggggtgagataaaaggcagggctcagaaaatcttcaagggaggggtgcacatattttacttcataggatacctctggcagggagggaaaatcctctttacacagctcctttaagtccttcagggtgttttccggagagtccatatccagtttctgtccctgggtcaggccctttaaaaccttgggattggagtgaaggagccggttgatctcctggctgtcggcagttaattgggcgtacagtcttttttctatctgttccactggcacgtaggttcccacctggctatgtaataaatattcataatattcctgaccgcccttcaggtaggccaggccgttctggttctttccagtgccccgcagctcctccaggccttctatgagccgtttgtaggcaggtatcacagaggtttccagaatcttctggtgctggctttggcacacggaaagctcttttttgctcagcccgggaaagtcctggagtttttcctcgaagatctgggaaagataattggaggaggaatcctggataaaggccctgcactgctccagcacccggtccagagtatcatcgctcataaaaaagcctttttctgatttttcctgctcaaatacaaggatgctttcaaagtacgggcggatgcaggtgagaagcttcaggtaatcagtaatgtccttttctgtgtaaaagggatattctgccagaagtaccggaagctgggcctgtattccaagactggggctgagcatttcctccagcagatagttgtctcccagggaacactgggtgtggaagtacaataggagcatatccagggtgagctgattgtcccgggacagcttgttgtagggaaagctttttaacgtttcctcatattcttcatactgccggtaaacctggtccatatcttcggtgctgaccttgcccagggtgaccggctggccggacaagccgtattttttcgggtcagccagtgtgtagtggaggtttagggtgctgcctgtgagctcctggcggaacaattcctgagtaaaatccaagaaacggctgtctggggaaaatacatggcgggtgagaaaccccacacccagcccaaaggaaaaaatcagggacaggcacagtgcaataagggcgggctttttccatttttgaaagcgcatagaggaaatcctcgcaaaattagggtatctctattatattattggaaaagaataaaattatgatataataagaaaaacgaagaaagaagaaaactgtcgttgccacagtttcccaaggtccggcgctgcccatggagctgcaggcagagcttggggagatcggatttgtggacagcggcagaaattcagaacaggagtgtgaagtatgggagaacgttatgattgtgtgatcatcggcagcggtccggcaggactgtgcgccgctatttatgggcaaagagccggcctgaacacctttttgctggaaaaaggctttttgccagggggccagatgactaccacctatgaggtggacaactatccgggacttccggggatttccggctcagacctgggagaagccatggcagaccatgccaagaagctgggaaccgcttctgtgagagagacggtaaaatctctggaggtggatgcagacacccaggagaaaataattgtgaccaacaaaaatacgtaccgggccaagactgtgatcctggcttcaggggctaagcaccgccagctgggtattccaggagaagaagagctgagcggcatgggcgtgtcctattgtgccacctgcgacggggcgtttttccgggatatgaccgttgcggtgatcggcggagggaatgtggctgtggaggatgccatcttccttgcacggatctgcaagaaggtgtatctggttcatagaagggatgccctgagagctgagaaaatccttcagaatgcgctgtttgcctgtgagaatgtggaggttctgtggaactatgtgccaaaggcgatcaagggggaggatgaggtggagaagctggagctggcttccactaaggataaatccctgcgtaccctggatgtggagggggtatttatcgctgtgggcatcaaccccaatacagattttgtgaagggctttgtggagctggatgaggcaggatacattcaggcaggggaggatacagccaccaatgtgccgggagtctttgccgcaggagatgtgcgcagcaaacgtctccgtcaggtagtcactgcggtggcagacggcgccaatgctattttctccgttcaggaatatttggcaaagcaggaaaatttagaagaccatggcccgcaaggagcctgagcatggataagaattagaaaaacacccccgggcagggagccgcccgctgtgcagcaagaggattgcctgctgcacagcaaatgataacacgaagacggctcacgggcttttggggatgggttctaactatatttatttgaaatattctttgctgaagttgtcaatctcttcggtaactgtctcataaacgccggcataggtgctttccggtccgcccatggtaagtcctgggatgagatatttggtcccggcagtctcaaacaggttcttcagtcctgcctggatggcttctctggaccagtcggttttgtcgtattttccattgtccagaccgccctggatggtgatctggccgccatatttctggatgagctcaggaatgttgttgtcagatacagcgccctgatagacatccactccggcttcgatcataaaaggaaccagggtggcggcgtagctgtcgctgtgatggacaatgatctctactccgttgtccttccagaagccgtaaattttcttgtaggcaggaagaatgaattcttcaaacatgtccggggagaggaaggtgctggtctggcttccccagtcatcgtgatggaacagggcatcgggatggatgtggcggatggtttccttggcagcagaaatttcccactctgtaaggaaatcaatgagctcatgcatagcctccggctcctcgtagaagttgatcatagcgtcttccattcccatgaaatagtgaagcttttcgaagattcccataaaaacagcagatgccacaaatttttccttccggtctacggcattggcctgttccactgcctgtgcccaggcctcttctggatagtctacaggtgctggcttcaggtattctctccagcgggtcacatccttgatcaccttgtcatccccttcacataccgggaatggtccaggggtgccttcctggaaacggatcttcacaccccaggcattgatgatctctccacccacaggacacatgccgctggcggacatgatgatggggtcaaagatcagttccatatagctgtactggttgacgaagcgatcaggttttcctcctttaatagtctccatgaaattctctctgtttgttaacattgtaaaaccctcctttaacaattttaaagcctttttgaaggcttatggttccctcctgatccggcttgtaccggaggctgccatgcagcttatgtctgtattctaccagatttccaggcagaaaaaaatacggcattctatggggaattgaggcaccggtgcactacacaatgtagtgtgtaaaaagtggtggagaaaaatagaactgcttatggaaaaagctgtgatacaggggtataataaaagtaatgcatatgtctggaagctgagatctgccggtcatggcaggagctgcacaaacagattgtaggatggctgctgaggctgtccgggagtggcgcaaaggaagcacttggcgccgtgccaagaatgaaaggagaggaatatgataacgataaaatggttgggacattcctgtatgaaggtagactgggatggctatagggtggtgtttgatccttttcaggatggctccgtgcccggttttggaaacatcagagaagaagcagagcttgttttatgcactcatggacactttgaccacaatgctgcagagctggtaaccgtcagccagggagaaaaagcgccctttcaggtgatatctgtggctgctttccatgatgaggaaaatgggaccaaaagagggaaaaatacaatttttcttcttcagaatgaggagtggaaaattgtccatatgggagatattggatgtaggcttacaaaagagcagaatgagatcttaaaggatgcagatgtggtgatgacccctgtggggggctattataccgcagagcctggggagataaaagaaatgatggacaggctcggggccagagtggtgattcctatgcattaccgcagtgcttcctttgggtttgaagagctggcccaggtggaggagtacacaaagctctgtgataatgtaaaggtctattttacaaatactctggagatcaccaaggagatgccttcccagacggcggttttgacctattgttaagatagaagaggctgatgcacgaaagtggtgtttcagtctctttttttgttgcatagacaagcctctgggggatgccgccggaggtgtgcgctctcacctggcaggcgtctgtgtgatgatctgctccagaagagccccgacttgctctgcaatctcccgggtatccgcctcaaattgatttaatacataagactccacaacgcctaaaacggccatacctataaatttgcgcagaacctgggtatttcttccgggggaggcgttttccaggcggagacttaattgattcataataaaatccagcagccggtggcggaaggagacggtgctctctgttgcaaataaggcggcaaagaagggcttgcgctgctcaaagtattgaaaccagatcacggtcccctccacaaatcctttttctttcttcttctcacagatcacggacagctcttccatctgcacatttacgattgtattaagcagatcaaacttatctacataatgcagataaaaggttttacggctgatatctgccttctctgtaatgtcctttacggtaatggcatcaaaccctctttccagcagcatttccagaaacgctgcctgtattgccctctgggattttgcgatcctgcggtctgtcttaccttccattagaaatcctccttgttttattacacacatgatgaaaaacgtgtattactacataacccttttcatctggtaattgatttttgggggtattactttattattatatacatgagtaataatatacgcaagtatcttttttccatgaaaaggaggattataatgagtatgataaaagaaacagttacctttgaagcatttgggcataaagcggcgggaatattaagaatgccgcaaaacgccagggaaaagcagaatccagccattgtgtgcgtccatcccggcagcagctgcaaggaacaaacagcaggtatttatgctgaaaaaatggcggaaaagggttatgtgacgcttgtatttgacgcttccttccagggagaaagcgaaggggagccccggtatgcggaaattccctgtgcccgtgtggaggatattcgctgtggggtggattacctgaccactcttgagtttgtagacgcggacaggatcggtgtcttaggtgtgtgtgccgggggcggatatgcagtgaatgccgctatgacagagcgtcggataaaggctgtggctacagtagtgggagcaaacatcggccgtgtccagcgtgagagcggagatcccattcaggccttggaggccattggacaacagcgtaccgcagaagcccggggagagaagctcatgatcactgcctggatccccagcagccaggaagagcgggaggccgccggaattacagatattgatattgtggaggcggttgattattatactactccaagaggacagcatcccaattccccaaacaaggtgaaatttaccagtctcggtgcagtgctgggctttgacgccttccatctggttgaggtcctgctgacccagcctctgcagatcattgtgggagacaagcagggagcattcggatcttaccgggacggccacgagcttttcgcacgtgcggcatcagagaagaaaaatcttcttgtactggaaaatgtaagccattatgacctctacgaccagccgggaccagtgggaaaagcggtggatcagcttaccatcttctttggagaaaatctgtagaaggacccggattggaatccactgcagtccttggaggtttcggggcagcagaaaatagataaaaagcgcctgcctctcttgtaggttccaggaggacagcaggaaagaacgaaaggaaaaaactatgtcaagaacagcagatgaagttttaactcatcatattaacgccatgatgacaatggatctggagaatgcgccttccgattattcggaaaagctcattgccattacccggctggacggccggaaccgcacactgggttttgattcactgaccaccatattaaataattctgtaaagattgcagataaactggggctgaatattgaaaatgccgtggacaagctgcatacactgtttcgctgcggggtgggagattatgtggtgtatcttgcccagctgaagcccttttccacctttgcctgttttaactatattgtggaggacggacaggccgtgtatgtgacaggatttgcaaaaacgccgcctatgccatcaataggagtcaagccccatgcctttgaaccggggacggaaaccatggaggtgatggaaacccatctggctcatttccgtgaaggggatcctgtgaaactggtggatgactatgcagaggatgccattgtcatcaccaatttatcggaaaagccctttgtggggaaagaggcgatcaaggggtactgccaggggatatttcagaaggcgggagagcagtatggggcccttgcggctgaggatgcaaaatatattctcaaacaggccgtgaaggagttgggctgtatcggcttccgccataaggagaaaaaacaatacggggtcctcacccagcgggtgcgggatggaaagatcatctttgagtctgcagtgtttaaggatgtgcatccagttctgtgagaaactatagcgtccaggcagtttcaaaagcagcgtctgtgcaaataaaataaattcacaaagaaggggactgcccacagccgggtagtccccttctttgtgattggggtccagaagcaggaaaaaacgaatttttactcatgtcgaaatttgacaaatgaaaaagactgtgctacaatgcacagaaacttaataatatgtaataaatttgtaataaataaaggagtaaaaacgtatgatatttcataataaaagaaaactgatcacagcaacagcggcttttatgggggcggcaatcttatggggaggtcctggtacagttcttgttcaggccgccgattttcaggcagagcagcctgtgaaggtcacagatgtggaaaaacaggataaggcccaggataagaaagagaaaaccactgccgcggatgacaaagaggccgagaaggcagctcaggagaaagctgagaaggcagctcaggagaaggcccagaaggcagaggaggagcgtttggctaagcgcagccagcttgtggattttgctctccaatatgaggggaatccttatgtgtatggcggaaccagccttaccaatggggcagactgctccggctttgtgatgaccgtgttccaggaattcggctacagccttcccagaacggctgcggaccaggcggcgtcctccacccagagaagctttgaggagcttgagcccggggatctggtattttatggagactggggtattggccacgtagctctctatattggtgataacaaaatcattcacgcaagtactgagtcaacagggattattgtgtcggattatgattatgaccagcctgccatgtacggttcttatatggaatagctgaaaaaaagtgaactttgtataaatttcacaaaatatggagattggcgtcgaagggtgtcgaaaccaagtggataagttatccacaatttgaaaatggggaaacccttcaaaatggagttatacacaaagttatacacattatccacatggataacgtggggatgaattgatttacataaaattccaacaaacggatgttttggacatttgtaataaatcgttgaaatctagggagaaaaatgtaaaaactgttgacaaacaaataatcaaactttaccagaatttacagaccaaaatgattttttatggagaaaacctggtttttttcagaatatattggcgcaatttaaagattatccttgtgaagaaaaagctccttcatccacggaatttaacgttttgtggagaaagagcttctttttatgcatgtggaaaaacatagaaaagtattttgtcaaaagggtgtggataaatggttatccacaccctttatatagattgaccagctcagactagccctgtttcattcgtttgataacctttaaccgggtaaattcctcccgttctttttcttccagggcattttggatgtccttggtgagagactcaaatttcgggatggttatatttttcagagcattggcccgcttctgggtctttttaatattggttgccagccggatggcggcgttctcgatcatggacagccggatggacagctccttcaccctttcaaaagcggcctttgcctcgtccagagatatttttgtactgtagtaggcataggtggggcggttggtgtccggggtgtattccaccaggggaatctccgtgcccataacgctgcgggtctttatccggatggaattctcaatgggaaccgtgtaggcgatctgttccacaaaggcgatcccgatctccatattcgccctctgaagggcactgtaggcatatcggaaggtggtgtcgatctccgtctggatttccttcgcctggtcaataagctccatcatttcacgtatgagtatatttctctttttgtccatgagctcaaaaccctgtttggacagagccagagagtttttcgccagtatcaggtttcccttggtgggaaaggtattgggatccatatagtcacctcttttcagcagttacaggaacaggcagatcactcttcctgtgcaggatgataatactgttccaaaactttcgtatcaatacggtccagttcctccttgggcagcatgcccagaagccgccagccgatattgagggtctcaatgatcgagcggttttcatcgtctccttgtcccacaaactcgtgttcaaaggctgttccaaacttcagataggttttatccagaggagaaagctcatcctcgccgataacggaggccaaagctctggcgtcccccaccttggcatagcaggagaaaagctgattggccacatcctgatggtcgcctcttgtgtagccctcgccaatgccgtccttcataagacgggacagggacgggagcacgttgatgggaggatagatggcctggccatgaagctggcggtccagtacgatctgcccttccgtgatgtaaccagtcaggtccggaataggatgagtgatgtcatcattgggcatggtgaggatagggatctgggtcacagagcctgctcctccccggacaatgccggcgcgctcgtataaagtggccaattcactgtagagataaccgggatatccctttctggaggggatttcccctttggaggaggaaacctcacgcatggcttcgcagaaggaggtaatatccgttaaaataacaagaatgtgcatgcccagctcaaaggccaggtattctgctgtggtcagggcgatcttgggggtgagcagacgctctaccaccgggtcgttagccaggttcaggaacatgaccacatggtctgaggccccactttcctcaaaggttctgcggaaaaattctgccacgtcatattttacgcccatggcggcaaagacaatggcgaacttctcatcagaatcggaccccagggaagcctgctgtacgatctgggcagccagcttgtcgtgggggagaccatttccggagaaaatcggaagcttctgccctcggatcagggtggtcaggccgtcaatggcggaaattccggtgttaatatagtttctggggtattccctctttacgggatttaaaggaaggccgttgatgttcaggctcacctcagggacgatctctcccagcccgtcaatgggctgtccaatgccgttgaaggtccgtcccagtacctcggggctgagcccgatctccatggggcgtccggtgaggcgggtgcgggtattgctcagggacatattgtccgtaccttcaaaaacctggatcactgccttatcctcataaatttctacaatacggccgatctttgtggtgccgtcatccattttaaattccacgatctcctcataggaggctccgcggcttccctccaggactaccagagggccgtttatttcacttaagccaagatattcaattgccataaatgctctccctccttatccgtttcgttccaggacattgtcatagaaccggtcgatctcttttttatagttgtcaaaaagctccggctggccgttgggaacatcatattttatggctatgatcttttcaaaaatattgtcttcctttagaacagacataggcattccacggttcacaagctggcggcatttgccatacaggtacaggatgatatccatcatcaggtactgtttggagaggggcacgcaggtgtcctcctggtggaaggcattctgctgaagaaagcccagacggatcacccgggcgatttccaggatcagcttctggtcatcggggagcacatcgcttccgatcaactttacaatttccatgagggagctctcttggttgagaagagcgatgatctgattccggtaggatacaaactggggagatacattttccctgtaccaggaggccatatcttccagatattcgctgtagctgttcagccattgaatggcaggaaaatgacgggcataggcaagagccttgtccagggcccagaaacagcgcacaaagcgcttggtattctgagtaacaggctcagagaaatcaccgccctggggagatacggctccaatgatggttacagaaccctctgttccgtttaagttctgcatcatgccggctctctcataaaaggcagaaagcttgctggccagataggcggggaagccttcctcagcaggcatttcttccagacggccggacaattctcgaagagcctctgcccagcgggaggtggaatcggccatgatggccacgtcatagcccatgtcccggtaatattccgccagggtcactccagtataaatagaagcctcacgtgccgccacgggcatgttggaggtgttggcgatcaaggtagtacggtccatcatcaggttgccggatttggggtcaataagcttgctgaaatcctccagaacctgggtcatctcgttgccgcgctctccacagccgatatatacaataatatctgcatcggaccacttggcgatctgatgctgagtcatggtcttaccggttccgaaaccgcctggaacggcagctgttccccctttggcaataggaaacagggtatccaggatcctctgtccggtcaccagtggattgctggccggaaatctgcggaaggtaggcctgggaatacggatgggccacttctgggcaagagaaagccttcgctgggtaccgtctggaagctgaatggttacaatggggtccaggatggaatagtctccgtccggaactgtctccacaacggtggcctccccgatgtccgggggaaccatggatttgtggagaatggatttggtctcctgggtctgggcaatgaaggtgccggcgtgtaccagctcaccgggttttaccagaatgtgcaccggccattttttctctgtgtccagagcgtttacatttactccccgggagatgtattttccggattccttagcgatttcctccaggggacgctgaatgccgtcaaaaatgttgtggataataccagggcccagcagaacggagatggcgtctccggttcctgtcacggtctcccctggcttcagtcctgtggtctcctcaaaaacctggatggtggtggtgtttttcttcagaccaatgacctcgcccaccagattctcctggcccacatggaccatctctgccatcttaaggcccggatctcccttcagatagatgaccgggccgtttacgccgtagataatacctgttttgctcatgactgataccctccctcgaatgtaaattccttgcgcagggagacgaatttctccagaaaggaattgtcgatcagtatgttcttcttggggatggtggcccggatcccgcccataaaggactcctcagagatatgaaggggcagtccggttctggcagtgagggaggtaagcttggaggcgtcgctggaggacagatagataaaaatttcgtcctcctctgcgaattcctgtgcctccaagattctctcacacagataatcttcatattggggcgtggtcataaaggcttccagacggtccttcacttccacgaacagcttttcctttaattcattttgttcccggttccagcgctgctttaaggtaaggtgctccttggaaagagccttgttcacttccctgcgggagtgctctgtctctgcctttatggcagcctctgtctcttgacgctttttttctttatgttcttccagctcttcttccagacgtttccgatggttctcgatctcttcccgggcttcattttctgattctgcaaccgcggtttcatagaagtgctggagtttttcctcaatattcatggaatcacctgcctataattttagtcctatcgcctcatttacatatgaggtgatgaaatccggcttacggccggtgccgtggcggtctgggatctcaatgatcagcggagtcttgtgatagagcttcacctcgtcgatcatctggggaaattcccggccgaatttttcagttagcagtacaataccgatctccttgtccgaaagggctttttccagagcctgtctcagctcctccctttcatggacaactacgccttccacacctgccaggcgcatccctgtataagtatccacgttgtcgctgattaagtacattttcatagaaatcccgccttttttatagcttacctaaaatcatgaaggagatgatcaggccgtacagagcaataccttctgccatggctacgaagatcatggacttaccgaagagacttccgtcttcactgatggcacccagtgcggcgcttgcagagctggcaacagcgataccggagccaatgccggaaagaccggttaccagtgcggcgccaaggtaaccaagaccggtggcaagacctgcctgagcagtgtcagcggcctggatactggaggtgcctgcaaacatcacaatggaggccacaagcatggttccaaagaaaaagaagctgtttgccacaatggattttttgtatctggctttatttttctctccaaggaagaaataaccgaagggaacaatgatgcttaaaaccagtgcgattgctgttactacttgaattactgctgtcatttttagaatcctcctaaatcaatgttttctttaataattatttgtttgaccttttgacggccccaaagaaaaaccttgtgccatcgtcccgggaccctttagcgggagccggtggttttcttcaaaaacggacggaattcccggccgctgccagtgtaaaaacggctgaacatttcgtaatattccagacggagcacctggatgcctacgatcaggccctccatggcgctgacaaatacattgcccagaatgatcaccagccagttggggcttcccccgttggcggcacctgccagcatgagaaccacctccatcatggccgcatggcttaccgcaaaggcgccgatacgtacaaaggacagggtgttggacagataactgagcaggacctcaaacatttcaaaaaagctttggacaaagaacatgcctttgccgccttcgatggccggcgcttttttctgaatgatgcgtgtgaggggttccttgagcatgatcaggatcaagggaacaccgaacatgataatgagcaccgcctttgccggaagagaatgtccggtcataaacaaaacaattactgcaaccagggaggcatagaataccatgcctgcaatggcattttgatcaaacagaagattttccgtgtctttggctctcagagcattgataatatggaagatcatggtcaccaggatcaggaacattccaaaagcaatggcaaccacaaagaccgtgttcatggatccaataaagggcagatcgatcatggccgttttgggatggagccatagggcgggcagaacctcctcaaagccgaagaagcttccgtagagaaagccaaatacggtggaaaagatgccggccaggctgatgatggcagccagagccattttcttaaagtgatacagcacggccccgccgatgaccaggcacaggccctggcccacatccccgaacatagcgccgaagataaaggcataggtcagtcccacaaaaaccgtggggtcgatctctgtataggaaggaatcccgtacattttaataaacatttcaaagggcttaaatatcttaggatttttcagcttggtgggaggctgcttataaatattatggtcatcatcctccaaaatgcagaagatcttctcgtcatcctggatatccttctggaacttctcggcatccccctctgacatccagccgcacagaatgtagaatacttctttcttatttctggcgcttgtacaggccgccagtctgcgcacatcaaagttccgggagagactgtccagagtttcccgggcggagatgatctcctgggagcggtcctccagaagcttattcagagcggttttgttggctgccagctgggaagatatcttgttgtagcgggcagacagggcttcataggcctcccgcccagtgccgtgataattgtccgggatgatgatcctctcaaagtgcatggatgtgtatacggcgtccacctgggtggtctggcttttcggcacaaaataaatgccccacacatactcgtcatcctcatcacatttatagaatatggtatttaaattgccgtatatatatttttcaaattgactgtaatactgcttttcaattcggccgaaccgcttgcggatgtgctggaaatttacgatggacgagacatcataatccagactccggaaagggcggatgatcttcagagattcggacatgccggccatctgttcttccatatcacgccgggagttgatcagttcttccgcactggcgtctatggagtgaaccgtgttcagcgcctgctccagggtcatgggggcaggggtgactttttccggatggttcaactggctgcagtacccgctgatggtcaccagatcctcccggtagggattgatctccagataaggagacagattctggacagtggtcagctctgacagggcattttccagatgaatctcatacttcaagaggtattcattgaccacccggtcaatgtccgctttcggcccggttatacttacaaatttcatctttacaatcacgatgtgttacctccgggatgttagtttctgtgaatataatgcatagtctcagcagcattgacaccgtagcgcacgcattcaatggcaatggtgagacgtgtgacttcatgttccttatggtagagataagagtagatgactgctacggaatagggatccttgcgggcctcgttttccagaatgctgcgcagggtaaaattataaaattcctccagggtagcaggggtcagctcttggtatcgtctgccataataggttttctttaaaatcaattggtattcatccaaatttggggcttccaccagtgctttgatctcctccttcttcagcttataattcatggggatcaacagtgcatagatctcggccggggtcatctggaaaatctgtttggagcgctgaataaactgaatattcagcaggtcaaatttttcaccataagccttggtgatctcttcaaaatccttgccggaaaaaagcttcttgcgcacgttccaggtctgggtaaaataatagagatccagagccattccatagtcaaagatcagggcgtgttccctgtcctgaatcttggaaaggggctgataaaattcattacccttcagggcccggataaattcatccatggtggtgcagcttaccagctttgtaaggtccagcttggagtgctgccggaaaaaatccgtataggcggacacgtctacctgctgcatctccctgtggtcaaacagattggtcataagctctttgagcacccggatctcgtatcgcttggaatatagccccaggaatttgcgctgctctgcattggcaaaatgatagatgcgggaaaagtcctgaaaaatagattttttcagaagccgttcaatctcccctctgtggagcagattttcatccagagacctccagcgggactggtattcaggtgtctttttcaggtaggcaaccacctgggaaacatgatcaaaggtggctatttcctggagctgttcttcgctgatgagctttttctgcatggcccggattttggtggatagtccgctgtatgacagcaaatgtcccatagtttcacttcctttacctgtattgtttcaatccgcgctaagggaatattccattaatgtgccagaattttttcaaatagctcctggctcaggcggtcgtgattcttctcataatatgctttcatttgaacgatgttgtcctctgtatgggaacgcagggcgcttagctgctgttctttgtcctcttccaatttctgccggatctcctgaagccgtttgaccgtttcctgttccagttcctggtcaaattcccttgcattttgctccatagtttcagagagagcggttttctgggaggcggcgtcctccatgattttttgtgcagtgatctctatttcagacagcttgctgagtattagttccatttgcaccctcctttacttctaatttcatcccttaatcatacacccgatttgtgaaaaatgccaatataaaaatgttaacattttatgattccgtgcaaaatggcgaattgtatcaatataagtgcaaaatctcactggttttggatggaggcaaaacgcattcacaattgtttttcggtggaaaaccatgtatattgtaagtattgtcattataatagaaaaaaatcaggaggaatttatgagattacgaaatattccgggggcaaaggaaaccatagctttcagtccttatgtggtgcaggaaccggaaaaaataaagggcacctgggatcaaatatttccaagaaaacagccgcttcatattgaggtggggatgggcaagggaaggttccttatggacctggccaggcttcacccagagatcaattatgtgggaattgaaatgtatgacagcgttcttctgcgtgccctgcagaagcgggaagagctggaagaccagggggagagtctggaaaatctgctgtttatgcgggtggatgcaagggctctgccggatattttccaaaagggtgaggtggagaaaatttacctgaatttttcggatccctggcccaaggcacgccacgccaaaaggcggctgacctccagagagtttcttgcaaggtatgagcagatcctcatccccggcgggctggtggagttcaaaacggataaccgggagctctttgacttttccctggaggaggtccgggaggcagggtggagccttgtggatcatacctatgatcttcatcataatgaaaagatggcagcggggaatgtgatgacggaatatgaggaaaagttttcttcccagggaaaccctatctgtaagctgatcgctgtaaagaaggggatagatggattttaggagggagctggggaccctttttggctttccttggcagggaagctctgtcatgggagcggtcaggtgcatatactggctgtaagaaatatcctggggagattgtatgaagcctgcgaaaagggtgcagagtctgctgacacagtttggttatgatcataaaaatgtaaaggaacgggtcagatccgtgaagaaatcagcagatgaactgagcaatatccttgaaaaaatggggaaaaaagaaaaaaaacaataatttctaaaaaaatataaaaataggggttgacttttgaccccgtttgcgcttataatatcacttgcgttgaggaaataacttcaacacaaaagataagataagccaagcgcctttagctcagttggtagagcacctgactcttaatcagggtgtccagggttcgagcccctgaaggcgcatcaaaagcactgtttttgcggagaatcgatagccgcggggacggtgtttttttagcgtccacagaatattttggagagaaaaaggtatccagaaaatatcaaaaacatagaaaataaaaagccccatgaggaatagccccatggggataaaggtatcaagtctaatacgtcttaaaaaagataggatccaatcgataaatatcagaatgcaaaagctgggattgttgagcaaggtgcagatacatttttgtaacgtcataatcagaatgcccaagcaaaagacgcaacatctcgatattgccaccgcctacgacataagaggttgcaaaagtatgacgaagtaaatgcggatgcaaacgaccaataccagattttgattttaaccgtgagaaaagctgtttaattacgttattattgataggacgaggacggcgaagctgaagaaatactgactgactgccaggtaaatcattatagttacgataaagcacacaatatcgtaacaaattagactttaaccgtggacacaatataacaagcctggttttatttcctttagcctttgataatcgtattatatttttgtcatacagcaaatccaaaaagcaaagatcaacgacttcagacgagcgaagcccggcatccagcatcaaatgcacaatgcaccaatttcttaatcccatttctgtctttaaatcaaaaagcttatcaataatttcgacttcggaattatataaaggtataatttccgaagaatcatccttaggaagcttaactttagaagtaaaattaaggcaaaaatcattgtctttgcagaaattcgcaaatacttttatagaacgtgcataagtacgaatagacgtagcagacaaaggtgtatcagaaggagacaaaaaaggatgattataaaatttaggacgtttgcgcaaatacttgatataatttgcaaataaatctctagtcatttcactacagtatatatcttcataaggtctatttaaactttcctgacaataaataaaaaaattagtgacattatcacgataatactgcaatgtatcatccgcacaagatgtttccttatcagcaataaataattcgtacgcttgttttaatgtaatatccaaaatatcacccctattctttttttaactcctcatataaacgttcaatgccagaaaaagaaaccattttataatatttaacaaaatcatttttagtatggaaaagatattcaaaattcataaaaacatatttaatttttctaaaaacatcatcatcaaatttttcccctatcaaatattcaaattctggtttcgtaagagtctcttttaaaatacgctccagccattttttatccctagaaatttgttcggaaacagcgaatcgaacataagaatcatctaaatcattaactgcataaagcgcatccaaaacagaataataaacaattgcaaaagtccccctatcatcaacttcgttcttccattttttggctatacgtccataagataattttaaaatttctatatcattgtcaaaataacccatttacgtcctccttcattttgtgttttaaaactaattttgatcacaagaaattaaatgctcatagtaccttatctgacaaaatttagtaccaatattataactagatactttataaaattgacaatcatcctcaaccagctcattatgtaacatctgtttttcaatattatccaaaatgtaaactgtctctacaggagaagacaaattacgactggaccaatatttttttttacctttaatatgctctatcaaatctttggtagtatattttgtaatatactttgtaacagcttcattttgcttaactttggtggctgtagtaaatccaaacctataacgaccgatattatatatttgttgtccatccttggtataatgaccgctatctacaataccaagagcatcacagttcgaaagcaggccatgaaaatgataggcaccatctttatgacgctcaggaactattaaatattttaaggacccatccgaaaccgtacgcatattattcaaccacttacttattttcctagtacaatccccataatcatacctatttactgcatcaggcgaaaaagtaaaagttgcaaaccagtcccagttattggcccgtgacaaatcatatatcttagaccttgcccttttcagactattagtcaaactgcgctcctgctccctttccaactggtcaaaatcataaacttccctgactttttcaccattaaacggctcagttatcaattcagtcttttcaggtcgttcttttttgccagtatacacaagattagaataaacccttgtttgcacctgaccattaccatagttcttaaccttaacattatacaaaacatcacctcattcgtgtccgcataccacggatttttaaccttccagtgatcccgatcggaaagaagcagtccgctggagaaagaaaatagtgttaagtgttgctatagtcaagtaagacccaggagcgtgtctggcctcctagcggggcccctgcaccccgtccccgtcgaccaaacacgcctcctggccgcctatgttaaataagccatttatacttgcgcaaaaaccaccgattaaatcgttcttcatccatatcaaatagcaaatcatcataatacagaaagtaaaaaatcaaaaagtataaaatagagaaacgagaagtatatccagtaagctccacacccataccaccgtcaacgcctattgcccacaaaaaagataaaccaaaaaaataaaaagtaaattttttcatacgatctcccacttcagacatcaaacaaaatcagaagtatcaaaaagcttatacgaatcataaaacttataatacttcctacgaccgacaaaccattccgtatggtcctttttctttgtatccttattttccactacgataaatgacagaaatccgcctgcaaataaagataatattttaccaaaaatctgaaatcggcccacattacgatggttataatcatacaaaaacaaagccctaatctggcggtcaatatcctcaaatgcctgactgacaagtataatatcataaccaaacttacgatgttgcttaaaaaaattacaccacgctggacggtccttagcattccaggacctcgagttaaatttatacgcacattcgtcaatcactaaaagtgtctgaccttcaataatatggccagacttatcacgtttatggatatctaacgcacgcctcgctagagatttaacctgcatatcatcagttgatatcatagtaaatgtaccaagttcatccttgcgccttttacggtcataaaaatggtcattaatatcaaaattagccacaacatctttaccgcgtctaagataagtatcaataatcttagcaacatgcaaacttttacctgacccaggtttgccgctaaaaaacttaatcatcccctacacctcccctactttttagcataagatattgccttgcgcacatatttaaccacgtaataaacagccacacaggctatccagatgcccaaaaatgtactgcaaacatcaaaaggtataaaatagtttaaataacccaaaaaatcaaaattatcaatttgagcacacatcaaaataaaaggagacgtaggcaacaaactaagcaaagccgacaataaaccaaaaactgtatccaacaaaaatccagcaattgcacccattacttatcatcacctccaaacatattacgagttaatataattaaaaaaattataaatgtaagagataacatgcttctagacattttacttattttgtcaaaatcagataaatctatatctatagattcctccacgcctaattgctctaccttaacaggaatagaaaactttggcacttccggcgtagccgctaatttagaaacaacaagtacaacatcccaagggattgatgtcggaaacttagttttagcaatatcagccaatccactaaatttatcaaaaatcatatctaaaatcgacacaccatcctcaatagccaacaaggcttcgattatatgcatgttatgcaagacatcatccagcttaccattagattcttccaactgttttataagctcatcaagcctattattgttatcttccataaactttaatataagctcttctaattttgacaaagaggcagtaatatcttcatagcctggtgctggacttggagtcgggataccagtaggcaaaggaccaggagtcacagatggattaggcgtaacgtctggctttggggtcaaagttggaacaggcgtaggacctggagtaggtgtagggccaacccaatctgatgggaaatcctgctcaaaaatgtatttattataataattatttgtcacattgttaataatttcttgtttttgtacatcagtgatcccaccattttgtgttatataattttgtatttgctgattagttgtattagcaatatctgtattaacctcagccatatggtcaattaaaattttaggtattgtaatgctaccaggcaaattaatattaccaacataagcgttggaatatgattcattaagcaaatactgtaatgcatcacgtttagtataaaaaactttaataggaggaccaaaccaacccctatactgaaaatggccagattgcacataaaaagatttagtttgattataaaaaccactagaattaatacgcatagcatactgataaaaagaatagtcttgattattatttaaattataacgtttcaaatcagcaccatttaaataaaaaagacttatctttgtattagtaagtaaataagttccagattcatatctaaaacataaatcatattttgccatatggtcattaaattgcgcatgtgtagcatcatccattccaccgctattactaccataataatccaaataaatagaatcagcagtatatggtttttctggctcaaaaagataatatccatttaaagcagtaagtttacttttggcatcttccttaatattattaataaaattgttattaaaggtatattcgttcgtctcactgttatatgtaatatcgttatttgtttgagtaatatcgattttaccatcacttgtaacagcatccggataatgattatagacagcatcatacaaatcataaccagcatcaactaacgccttatccgcctttagccagccagttaaaatattaattggcaggcacaaaatgtctataaccgtatcagtaataaatccagcccgaacaacagatacaggatatacaatagacatacagatagtaataaccactaatataaaagcgattatacgctttaatcttatactcattactcacctcccaataaataaaaaaagaagcaggtttccctacttcttagttttgagtattttactgactgtttttgatagctttttttccgaccgttctaacggccgatttttggccttatcagccttattcataatggcctggttcttattcatcagcttggcattcaacacctccaggtcaacttcgcccttagcttttttcatacgtgcacctcccagtactatataaatccattataacccctaaactaagattttgcaaaagaaaaaggcggatacccaaaaatatccgcctccacctttcacacccctataaaactgtcaaggtgcaatccatatcccctaatttgccagagatcggaagaaacgaacgcccaggcgtaaggcaataccaataccggcaataccaagcgcaatgggcagagcggtagtaaacataccgttaacatcaccctgaatggttgtcagagcagtattaaaagcagtcgttaaagcttcactcatgcatgtgccccctttctcaagatttcatattaataaggccaaaagccttaaaaataccataagttaaaagacaaagtattgtagtcaaacaaaagcccacagcaaaagccggagaaagactactaaaaatttccacaaaagcgtcgggaagataaagtaaattcaaatcaacttcctgcgcaattggaataggaatatcagcagaaaataaacccatcagattttcctccaaacaatccgagcgaaaagaatcccggccaaaaaccaaacggaaaaaccaatcacaatagatactgtattaccaaactttgtagcttcgacctgctccaagctaatagcctctaagtttgcgagacgagagtccaaacttgtaagcaggtctgtatagtcaaccgtcacctgaacattatcagaaccagtagtctgctcaggagtggtgtcactgggcgattctacctcttcagagccccctgccgtttcggctgaaggggatatttcgggagcaactgtaggcattacttcaggtgacggattaaccagcaaaggagcttcatcaggtgcctgtccatccaaaaatatatttgctccatcatcttggacaacatcaggcgaagttgttgaatcttcgaaatcattcatccttttctctcttttccttttttgctggaatataataacatttctttttcgaccgataactttttactctcaaaacaatatcggccaaaaaccagataaccgtacagacacataccatttttaaaagtactaataagtccatagatacctcctttaatttaccgcccgctcaaaggcaaaatatcaatcatcctcctcattctttcttccccatgggatgaaccactttttgcctagctcaaaacccatgaccttcaccacaccattaactgcagtcaagagaacaataaagtaacaaactattactaaaaacgattgcacaaatagacacctcccagaattttattttacctcctgttctaagctaagacagcgaacaaggcggatagggctatcagcaaggggacagctattcccgctatccccagttgctgaatcatataaaaggagggttaacggcggataatccgctttacaagcggtgtaccgccagtaagtgggattatttggccggatggatatccaccagcctcagcgagttataggcgggattaaagttaaaaacgcaagcgcactttgtataaggcgcaatgccgggtagcactttggcaaaaagttgctcatcgacagcacaacgcaattgctccatgccatccaaaaaagatacctcattgtaatgcttactaggatccttaatgccttgacggcactcagacatgtgatagacaaaattaccgtttaataccatgttaaaacctccataaatttattgtgttatattattaaaaacgctatcaagcaaagccctagactgcgcacatagcacatcatccgcatagtacagattgaatctattacacaagtcctcgaagtccaggggttcgataagagcgtctgtttctaaagcaaatctaaacaaaaattgataatcattcgtaattatctcaaaaccgctcaaaacatcaccctttccacatttttactttcccggccttttaaaaccgggaaagttatccacaatcaaacaagaggcacacggatatgacacggacagtaatcatcgcccttggacaaaatgtaatctaaatcccgacaaatgcaatctggcagactgcttcgtacatgcccattcatgtaactggacatctgcatgataacattcatgtccttagacacctggcccgatttattgacaatatagccgtcagcgattttgacaagttcccacttcccatcagttctaagccatggtttccactgtgatttctttgacatatccataccccctatgttaaaattaaatattaatcaaagtgtaaaggtaactatcccttacaattatattatagtagataattatctacttgtcaatagataacgtagataatattctactttttaaggaggtactatggatatatatgatagaataaaactaaaagcagacgaagcaggaataagcataaaagccttagaaaaagaaattggactaggaaatggaattataaaaggatggaaagaaaggtcaccacaatgcaacaagctggaaaaagtagctaattatctacaagtaacaatagactggctgatatcaggaaaagaagaaatttatttaacaaaaaacgaagaagaactattaaaaagcttcaagttactaccagatcgggagcaaattaaggtcatcggaataattgaagaaaaagcaaatgtgtatagagaacaacgggaaaaatcatcagcatccaagactggataaaaaaaatcatagaatatggtaaattttgaaattgtatatacataagcgataataactcttaatcagggtgtccagggttcgagcccctgaaggcgcatcaaaagcactgtttttgcggagaatcgatagccgcggggacggtgtttttttggcgttggaaaaagaatttttaacagaaagaagtctgaaacaggaggcttctttttttctttgtcgcattgactttcgggtcaaaaacctctagtatagtgtcataaggaagaaaaaaccaagagaacctggaggtaggataggatgaagcaggatatgattgtaattctggacctggggaatacggagaatacggttctggcccgtggggttcgtgatatgggagtttacagcgagatttatccccatgatattaccctggaggaattgaaggcgattccaaatgtaaaaggcgtaatcctcaacggcggtgaaaaccgtgtggtggatggcgtggaaattgacgtaaataaagaaatttatcagctgggctgcccgttcctggctgtggatcatgacaaggccttgtgtgaggcaaagcttagccagtggccttccggagaagaataccagaaggtgcttaaggaatttgtgtttgattcttgcaaagcggaagcaaactggaacatgaagaactttattgaggatcagatcgagctggtgcgggcgcaggtaggggacaagaaggttctgctggccctgtccggcggcgtggacagctctgtggtcgctgcccttctcattaaagccattggctctcagctcacctgtgttcatgtaaatcacggactcatgagaaaaggagagtccgagagcgtgatcgaggtgttcaaaaatcagatgaacgcaaacctggtctatgtggacgccacagagcggtttctgggcaagctggctggtgttgaggatccggagaagaagagaaaaatcatcggcgcagaatttattaatgtgtttgcagaggaagcccagaagctggacggcattgaattcctgggacagggcaccatctatccggacattgtggagagcggaacgaagactgccaaggtggtgaaatctcatcacaacgtgggaggtcttccggaagacctgaactttaagctggttgagcccctaaaacagctgtttaaggacgaagtgcgtgcctgtggcgtagaactgggccttccctatgagatggtttaccgtcagccgttcccgggtccgggtcttggcgtgcgctgtctgggagccatcaccagagaacgtctggaggcagtgagagagtcggacgcgatcttgagggaagaatttgcccttgcaggactggataaaaaggtatggcagtattttaccattgttcctgattttaaatctgtgggtgtgaagaacaatgcccgctgctttgagtatccggtgatcatccgtgcggtgaacaccattgatgccatgaccgcctctgtggagcaggttccctgggatgtgcttttgaagatcacggacaggatcctggcagaagtacctaacgtgaaccgggtctgctatgacctgtctcctaagccttgtgctaccatcgagtgggaataaaatgagaaacagccgggatgcccgtaaacaagggtttcctggctgtttttttgccttttggtacggaatactatgatcgcaacacttggaattgaatttttgggcctttgggaacaactcaataatcctgattttaattacctcgaattcgaggcaattaaaaatgattcaggcagtaacgcttttgttatgacacccaaaaaatgggtaattgacatccacgccattggtgtgatcaagaaacaaggccgttacgcggagacttatgcacacaaagacattgcttttgaatttgcttcgtggatttgaaagtgatttatttatcacatttctattgacaggagaagattgcagtgatatatttgtcatataaagagataaatatatctcttcggaggataagatgatatgaaaaaaagtgtaaagctcctggttggatttggcgtggctgcagctggggctgtgggagctgcgacctggtattcggtgatgtacaatgattcccgcctggttgaacccatggatttttccacctacacctttcaggcaaaggatctgcctatgattctttcaggcatttttttgttcctgtatgtgatcgcactggttgtaaccctgtttcgcactgccaacagacggaatcatatgatgaaggaaacgaatacaacacgcagactgaatccaaaactggggttcctgggatttttagggcttctggggctgggcgggttctggacatatactgtaaatggaatggtttttccctttgccttttttctgttctttggtttcttcggatttttttacgagggcaaaatgtccggcacgtttatggatgagcggttccgggaaaatgctgcccgcgcccagctgaatgcttttaagtttacgaataagatccttataattgccttgatcgtattctgtcaggggacatttatgaagaacctggagtataccttgatcgctgtcatcattgtgctggcactgaccctgggactgggcatgtttcttagtgaatatctgctataccgttacgaccagggagatcaattggacgaggatgaggaataagtcatggcagaatttgaatgcagattaaaaaaataccggctgcaaaaggatatgacccaggaacagctggcccaaaaggtgggcgtgcgtagagagacgatcatgcgcctggaaaaggcccagtacaatccctctttgaagctggccattgacatatcaagggctgtggatgcgcctattgaagaaatctttatttttgactgacaacagaaacaacttgtagtccgcctgtaggaggaaagctgaaaattatagttttcttccaacaggcggctttttttcggttaaggcttgtaaagacaagaagaatttagtaaaataactaaattgacaataacccgttgtaagggaaaggaatgtgaaggaaatggcactgaaggcaaaagacgttgccaagatgctgggggtttccacagctacggtatctttggtattaaataacaagccgggagtgggggaacagaagcgccaggagatcattaagaagatccgggagctgggctgtgactatatgctgaagggggtgccggtgaacaaggggaccgtcggctttgttgtgtacaaaaggagcggacggatccttgaggagtcccctttttttacctatattctggaggggatcaccaacagtatttccaactatggatataatttaaattttatttacctcaacaaaaatatgtcccgccaggagcaggaaattcaattgatgtcatccaactgtcagggactgatcatctttggtgtggaaatgcagagggaagacctgcaagtgtttaaggattccggcctgcccttttccattctggataattcttttcaggaaagtgacgtggattcggtggccattaacaacatgcagggcacggacaaagcagttcgtctgctgtatgagttggggcacagaaagattggttatatccggtgcaaggtgcggatcaacagctttgatgaaagataccattattttaagcgggctctgaagcatttgggagtagagtttaacagtgcctttgtggcggacgtgggctattcggaaagtgaagccagagaaggaatgaaggagtatttaaaaagtgccagggaactgcccaccgcgttttttgcagagaatgatttcctggcctgtaatgccatgcgggggattcaggagctgggttatcaggtgccggatgatatatccctcattggatttgacgaccggcccattacccaaatggtctcccctaagctgaccactatcaatgtgccgaaaaatattttcggccctgcggccgttgacctgctcatggaccggattcaaaataaccgggagcagtccctgaaaattgagattgggaccaatattgtaataagggaaagtgtgaaaaaaatcattcctcagtaagcttggggggaggaggcacaaaattagaaaagtaggatttgaaaacgaaaaactaaattattttaagaaaaatactaaatataactgaatgaaatttttcggtaaaaaccgtgatttatcaattggcgtagcttagcgtattcaaaacggcaggggatcccttataaaagggaaagctcctgccgcttttaggttttccgtcagatatatgattataaaggactgcgtttttttgcgtaaaaataaaggaaagaacggggcaaaacctttccctgtcacaggatcggccttgcggggatcagggctgagaaaatttttccatgagtttttggaaatccggatggccatggagaaactccagctctgggtctgtggggagctgccggataaaggcggcggccatggaggtgctgaaggcggattcctggttcctgcctttgacatggcggtataaaggtgtattgttaatgtcccaccgctcctgggtcatggactgaaggatggcatccagagcggtgatgcatgcctgggcatccttctgggacacggccatcataaactgggggaggtgttccacacaccccatgagataaaagtcccgggcagtctggctggaaagctgggagtagtactgtgcatcttcaatcctgccttctttaacggcgatttccgacagtgtgatcaaagtgttggagagctccgtggcggcttttagaagctgttgttccagaagggcacaggcttccccgtagttttcctggcgtatgtacaggttagcccggaggcggtttttatccacggacaatgggccggagaaagagtccagaagggtgtgggcactttcgtaatcgcctttgacaccagcacgggaaaccagcatggcaatggcctcattctttacctgccagttttcgctgtggcttgctctttcaaaaagagcagtaattttatcgtcatattcttcaggattttccggcggaaaaagggtcagcgaagcatttagcacagctgccaggctgtacagcagcagatcacagctggggtattccctaagcttgtccatggcaacgtcaaagcctgcggaaaagcctttttcctgggtgatggcctggatctcattggtaatttgaccaatttcctgcagactcaggtcctccttaaaagaaagaagcgtattcaaatccgtgcccagaaggcgggcaatgggaggcaaaagggtaatgtccgggtagctggctccgttttcccatttatttacggcaggggcggacacccccagataagcggccatctgttcctgggtgagatttttttctttgcgtttctggcgtatgatttcgttgatcttcattttgtattacctccgaaaatgataggaaaaagctttttctaagtttattttaacattccccaaagaagggaacaattgaattggaatcagattttaaaacgaaaaaataaccggcggttaatttcattctatatgtggtaaatatccttgctttagctcgaaagattgtaaaccatataaatgattttggttgacaattgttggcggctatgataaattccaattataaatgtgaaaagcagcagcttttccgtgaaggaggaattgatctatgagtaccatagcggcgacaaaaggaaagacgtatgaggtggtctatatggctgtttttacagcccttttgacaatctgttcctggatctctatacccacgggggttccgtttacacttcagacctttgccatttttatgacagtggcagtattgggtggaaaaagagggaccttgtgtatcttggtttacattctgctgggagccataggacttcctgtatttgccgggtttaccggagggatggggatgatcctgggacttacgggaggctatttaattggtttcattttctccggattggccgtgtgggcaatggaaaagctgtttgggagaaaaccagcggcacttctggcgtccatgatcgtgggtcttcttgtgtgctatgcctttggcaccctttggtatatggttttatataccagagatgtgggcgcagtgggaatgggaaccgttcttggctggtgcgtgtttccttttataatcccggatattgtgaaaatcgctttggcgatgcttttatctcaaagggtgaaaaagtatgcagtttaaaaaagaaaatacatggattcccatacgtccccaccatggaatgtgtctggcctattttaaaggctgcggctacagccagggatttgcccgccatatggaggaaatgctggagctttttcaaaccaatagggctgtaaagctttctgtaaaaacagatgaaatttgttctgcctgccccaataaccgggaaggaatctgcaaggacggggaaaaggtttcacactatgaccgccttgtgctggagcactgtgggctgcaggaaggcacagagatggcatttctggactttgccgggctggttcagaagaaaatacttggtgtaaataaacgcagggaaatctgcgggagctgccagtgggatcacatctgcagcaatgaaaaaagccgttttgcaggtcttgggcaatgatcccctgggggatgtctgcgggagctgacgaacaagaacatttttgggggctgtggagagttgtgcacacttaagggatattgactttttgggaagattgttttatggtaggtccgttacatacttgaatctaaggacaacataggaagagggataaccatgaaatttatcaggcaattttcaattattctcctgatctcctttttgggagaggccctgagggccctgctgccgctgccggtgcctgccagtgtgtatgggctggtactgatgctggcggcattaaagagcaaagtgatcaaggttgaacaggtacatgaggtttcggcttttcttattgagatcatgccggtgatgtttattcctgccggggtggggcttctcactgcctggaaagtgctcaagcccgtatatctgccggtggccgggatcacggtgatcaccacagtgctggtaatggctgtcaccggactggtgacccaagggatcatccgccagggaagggggagaaatgatggaaaaatttctcagtgattccttatttttcggagcggcggtgagcctgctggggtatgagctggggctggtgctgaagagaaggttcaaattggcgatttttaatcctcttctcattggggtgatctgcgttatgggagtgatctccatcttccatgtggattatgaaagctataaccagggcggaaaatatatcagctatcttctcactccggctacggtttgtctggcagtacccttgtaccagcagctggagctgctgaagaagaattttaaggcggtagcggcagggattctggcaggcgttctgtcaagtctgggaagtgtgctggtgctggcgaaagtgtttggtctggatcaaaagctgtacgtgactttgctccccaaatccattacaacagccattggtatgggcgtttctgaagagctggggggagtggtgaccataacggtggcggtgatcattattactggaattttgggaaatatgctggccgacgggatttataaaattttccgcatcaaagagcccattgccagaggactggctctggggacggcttcccatgccattggaactgccaaggccatggagatgggacctgtggagggagccatgagttccctggccattgcggtggcagggcttttgaccgttgtgggagcctcagttttcgcgggctttatgtaaaggaaggccgggatggcggctctggatgatcggaagaaaagtatccgttagcctgctatcccgctgcctgaaggagctagattttgtgaaattgtccaatcatatttttgatggtgagcatctccttgtctgtctcggtaatgttctgggcacagcgttttaattcacggctgatctcttcataaccttccatctcctcaatcccctgcttatacctgagctggtgctccaggctggcccagaaatccatggccatggtgcggatctggatctctgcccgcatgggagtttttccctttgcaaaaaatacagggatatccacgatcatgtgatagctgcggtagccgttgggcttgggatttttgatataatcccggatttcgatgacggttaagtcgtcctgtgcggcaatcaggtctgcgatggtgtagatatcgtcaataaaggcgcagaccacccgcaggccggccacatcgtgaagctgggtgcggatattttcgtctgtaaattcataccccagtttttttaatttccggtaaatgctctggggagatttgatgcggctttttatgatggatatgggatttctgctgtattccacggaaaattcatcgttgagcacctccagttttgtctgtacctcccggatggtacagcggtactgcatcatcaggtcattgaatttttttgtattggtgataaaggtttctggatccggggtatccagccattgttcttttgtattcattttacattctcctgttctgtctatgaggttattatacacagtttgttcctgtatttcaacgcaggcagcctccaaaaaagaattacacaaaaaatgaatgaacagctctgtacccacataggactgatgaaaaaaagtggtattttgtaaaaaaaacgaatgtgcgttcgaacctgcaaacccgcatgaacagagggcttgcaggttttttactggaaaaatacgaacacatatttgatatttttgattttatacctgtttattggacataatttgtgagataatccatttaagtaaaaactagttgccaggtgcacccaaggggctaggacgttctgattggccaatcagatattgcacatagtaagcggaatatcagaaaagagaaaaggggacgttgagaatgagaggaaacagtcaaggtgcaaagatttattctatggatgggaaatcagaaaaaacacacagagaagagaagggtctgtccaacgcaatggtgatcattttagggatcctaataaccctggagattatggtggcgggaggcatggctctggcggacagactccagtcctttgacgtaattgggatgggtatggcattttttgtgatcttctgtggagtggttgctgtaatttccagataggaggagctgtgccaaagtcttttcggcagaaattgaaaatattatatattttaaaggccttatatgagaaaagtgatgaggagcatccgctgaaggtaagtactcttataagggagcttgcaggatatgggattggggcggagcgcaaaagtgtgtatgacgacctggagtgtctcaaggattttggactggatatccgccacaggcgggagcagccctcaggctattatctgggggagcggccctttgagctggcggagctgaagcttttggttgatgcagtccagtcctctaagttcatttcattcaagaaatccacagagctgatccataaactggagggaatggccagcaagcgtcaggctgctcagcttcagaggcaggtttttgtctccaacagaatcaaaacagtgaatgagagcatttactataatgtggaccagatttacggggccatctcgaaaaatgtgaagatcagctttcaatattttgagtggacggtgaccaagaagacccgcctgcgcaggaatggaagccggtatgtgatcagcccctgggctctcacctgggaggaagagaactattatatgatcggctacgacagcgaagctgagatggtaaagcactaccgggtggataaaatggtgaatttagccctggagaattccagaagggatggaggggatctgtttaaggattttgatttggctcagtataccaggcagaccttcggcatgttcggagggaggagagagcgcattgaactggtgtgtgagaactggctggtgggagtgatcattgaccggttcggccaggaccggatcatcagaagagtggatgaggaacatttctccgtgtatgtgacagtcactgtgagcagccagttttttggctggctcactggtctgggagacggggtgaggatcaagagccccaagtatgtaagtgataattataaaaaacatctcagcagggtcctggaagcacaagaggattgaggccggggaaccagcctgcaagaaagagcctgcaagaaagagcctcaaagcccggtatgggagaaaaagcaacaaaataaacggtatttttacaggggaagaggacaaaaattgattttgttaaaatcttcccttttttgttgttttctgaatatatatcgggcaggctgcctatttgtgtgcacaaaatacagtatacaatctcgcaaaatgcacaaatattctgttgaaatttgtgcaaaattggcaaatggaatattgacttttgaactccaaagagtaaaatagttaatcatttaactaagttgcttttgcagtttaggatatgagttaagcagcacagcggaccgaagggtccgcatgacctgggaatctgaatgggtacaagagcctttttcagagtaccttttttaaaaaagaggagggatcaaaacgggtaatttgtcagagacactaatggaagaattgactgtaaaaacggcatttactatccctgttttcggaggaatcccaatcagcgagacagtagtagttacctggatcattatggctgttttagtcggattgtccatttggctgacccatggcctgagagtggagaatgtgagcaggaagcagttgattctggaatcaggcatacgctttctttcggacttctttgaagatattttaggcaaagaaggcaggcggtatattccgtatctgatgaccgtagtgatatatataggcattgctaatatcatcggggtcttcggctttgtaccgccaaccaaggatatgaatgtgacggcagccctggctgttatgagcattgtgctcattgaatatgccagctttcacaaaaggggaggcagaggttttttgaaaagctttgcagaacccacgcctattatgctgcccattaacattttggaggtggccatacgtcccacgtccttatgcatgcggctttttggcaacgtgctgggctcctttgtggtgatgaagctgctggaggtggtggctccggccattgtgccgctgccatttagtctgtattttgacttttttgatggttttatccaggcatatgtatttgtatttttgacatcgctgttcatcaaagaagcaattgagtaggaaaaagtaaaaatgaaagaatcaggaggaagatcattatgacaagtttagtggcaatcggagctgcaattgcagtattgacaggtataggagcaggtatcggcatcggcatcgcaacctctaaggcagtggaggctatcgcaagacagccggaggcagaagggaagatcagcaaaacccttcttttgggcgcagccctggcagaggcaacagccatttatggttttgttattggacttttaattattatcatgctgaaataattcgttaaaatagaaagaaaggcaggtggaccaggtgatacattttgatatgagccttgtctatacagtgataaacctgatagttctttatcttttaatgaagaagtttctgttcggtccagtatcccagatcatggagaagcggagggcccttattgacggacagatggcagatgctcagaagaaccgccgggaagcccaggcgctgaaggaagaatatgataccgccctgaaaactgccagggaagagtcccagaggatcgtggaacaggcaaaaggggaggcaaagcttcaggcagagcacattgtccaggaagcacaccgggaggccggacagatactggataaggcccaggcggctgtacagacagaccgggaagcagcaatggagaaaatccagggacaggtggcagagcttgccatggccgctgcttacaagatcatggcccggcagggcggacaggaagattcggcactgtatgaccagtttataaaagaagcaggtgaagctcatgacgcagacagccattaattacggtaagaccctgtacacccttggagtttccggggatgccgtgaagcaggctcgtgagatactggagaaggtgccccaggtgggagatgccctgtgcagcccggttctgacattccaggtaaagggccggtttattgaccggattttcccaaaagagctggggaactttgtgaaggtggtctgcaagaaccagaaggcagaccagcttaaggatatgctggaagcttaccaggcttggagaaaacaggaggaaggaattctggaggccagactgtattatgcgaatcctcctaagaaagagcagctggaggcggtccggggattcctggagagaacctttgggcccaaacaggtatgtatcagccttcgggaagacaaaagtcttctgggcggctttgttcttcaggcagcaggccatgaatatgactacagtctgaggggacgttaccggaacttagaacagagattacaacggaggtgaatggaagatgagtgcaattaatcccgatgagatcatctcgatattaaaagaagagattcagaattatgacgaaatcagcaaggaccaggaggttggcacagtcatctccgtgggtgatgggattgccaccatttatggcattgaccatgccatgtacggagaggtgatcacctttgaaaacggcttgaaaggtatggtccaggatatcagaagcaacagcattggatgcattttatttggcaaggatgtggggatcaaagagggcactaaggtttccaggaccgggaaaaaagcgggaattccagtgggagagggctttattggaagaatcgtggatgccttgggtgctcccattgacggcaaaggtgagattcaggctgggggatatcgtcctattgaataccctgcgccaggaatcattgaccggaagtctgtaagtgttcctctggagacaggaatcctttccattgattctatgtttcccattggacgggggcagcgtgagctgatcattggagaccgccagacaggaaagacctccattgccattgatgccatcttaaaccagaaggggaaggatgtgatctgtatctatgtagctgtaggccagaaggcatccacgattgcaaagctggtatccacgctggagaagcatggggcaatggaatataccacggtattttctgccacggccagtgactgtgcgcccctgcagtacattgtgccctattccggcacagccctgggggagtactttatgtaccagggaaaggatgttctgatcgtatatgacgatctgtcaaagcatgcggttgcctaccgggcgctgtctctgctgctggagaggtctccgggacgtgaggcttacccaggagatgtgttttaccttcattccagactgctggagcgctccagccggctgagccaggaggcaggcggcgggtctatgaccgcccttcccattatagagacacaggcaggggatgtatcggcctacattcctaccaatgtgatttccattacagacgggcagatattcctggagagcgatttgttttttgcaggcatgaggcctgcggtgaatgtggggctttctgtatcccgagtgggcggagcggcccagacaaaggccatgaagaaggcttccggcacggtccgcattgatctggctcagtacagggagatggaggtatttacccagttcagttcagacctggatgcggccaccactgcacagctcaagtatggaagttgtcttatggagcttctgaagcagcccttatgcagccccttaagtcttcatgagcaggtgatcaccttgtgtgcagccacacacaagaccatgatccatgtggaaaagaagggattgaagcaatatcagagagagatgctggattattttgacagtgtttatccccagatcgggcgggagattgaagagacgagacagctttctgccgaactcagtgcaaagatcgtaagtgtggctgaggaatttaaggagaagaatgggcaggccctggcagtacctgccgggaggtaatctatggcaaacgcaaaggaaattcagacccggatgaaaagcattcaggataccatgaagataacaaatgccatgtatatgatttcttcttctaaaatgaagcgggccaagaaggtgctggcggatacagagccctatttttataatacccaggcggccattgccaggctcctgcgccacgtgcctgatgtggagcacccttattttagtgtgcgtcatttggtacctaaggaagagcggaagattggatgcctggtggtgacaggagacaagggtatggccggagcctacaatcataatgtgatcaaggcagcggaagagttcatgaagggagagggccattacaagctgtttgtactggggattgtaggtcagcagtattttgcgaagagggatgtggatatggatgcaacctttcaatataccgttcagaagcctaccatgcacagggcaaggctcatcgcccaggaaattattgcccagttccaggagaggaagctggatgaggtgcacattatcttcacccagatgcagaatgcagtgtccatggagacggtgaatcttcagcttctgcctttggtaaagaccaagttcaaccccacggagattcccgtggatacctatcaggaagaatttatcctctctccctctgtggacgaggtgctgaacagtatgatccccagctatctcattggatttgtgtacggctgtctggtggaggcttatgccagcgagaacaatgccaggatgatggccatgcagtcctccacagacagtgctaaggcaatgcttaaggatttatccattcaatataacagagcccgccaggcggccattacccaggaaatcactgaggtgatcggcggtgccaaggcccagaaaaggaagtgatagaatgaatacagggaaaattgtacaggttatgggacctgttgtggatgtggaatttcaccagggagagctgcctaatatgaaagatgccctggaagtgatgaatgacagtcaaagatgtgtcatggaggtttcccagcatatgggcaataacattgtgcgctgcatcatgttgtccgcaagtgaaggacttcaaagggacatggaggtgactgccacaggggcgggaattaaagtccctgttggagacaagacgctggggcggctctttaatgtgcttggagataccattgacaacggagaatctctggagggagaagagcattgggtcattcacagagatccacccagctttgagcagcaaagtcctgcagtggagattctggagacaggaattaaggtcatcgacctgctggctccctatgcaaaaggaggaaagattggccttttcgggggtgctggtgttggaaagacggtgctgatccaggagttgatccagaatattgccacagagcacggaggctattccattttcacaggtgtgggtgagcgttcccgtgagggaaatgatctgtggtcagagatgaaggaatcaggagttctggagaaaacggccctggtatttggacagatgaatgagcctccgggaagccgtatgcgagttgcggagacgggccttaccatggcagaatatttccgtgaccaggagcacagagatgtactgttgtttattgacaatattttccgatttgtccaggcgggctcagaggtgtccgcattgctgggcagaatgccctccgccgtaggctatcagcccactctggctacggagatgggagagcttcaggaacggatcgcatccacaaagaatggctctgtcacctctgttcaggctgtctatgtgcctgcggatgatttgaccgacccggccccggctaccacctttgcccatctggatgccaccacagtgctttccagaaagatcgtggagcagggaatttatccggcggtagatcccctggaatccacatccaggattctggaggcagacgtggtgggtgaggagcattatgaggttgccaggaaggttcaggaaattctccaaaaatataaggagcttcaggatattattgccattctgggtatggaggagctctccgaagaggataagaaaacggtctttcgtgcaaggaagattcagaggtttctctcccagcctttccatgtggcagaaacctttacaggggtaaagggaaaatacgttccgctcaaggacaccatcaggggctttcagatgattgtaaacggtgagatggatgagtacccggaaaatgcatttttcaatgtgggaaccattgaggatgtgatcgccaaggcaaaggctgaggcggctgaagcagaataagaggtgaccatatgccaatgacaggaaatacctttggcctggaagtctatgccagtgacaagctgttttacgcaggaagagcccaggcccttatcgtgcctgccacagacggccagcatgagctgctggcccatcatgccaacattgtcattgccatcatcccagggattatgaagttgcgggatgaccggggagtgtggtccgaggtggcggtgagttccggctttgtggagatggtaaataaccgtgtaaaggtctttgccctcacagctgagcgtccggaggatatcgatgtgcgccgggctgaggaagccaaggagagagccgaagagcagcttcgccagcagcagagccagaaagaatatctgctcaacaagatggcccttgcaagagccatgaccaggctccgggtcaccagcgataagaaaatatagatggataagaaaccattgatctataagaaagcatagatttataagtaaaggactgccgtaaatatggaagttttcctcaaaatatgcagcgggctcagatgccagggacatattctgcgaaaaatccacatttgtggcagttcttttgttaagacaagatttagctggaagctgcgatccagtctgtctggccattgcaaatttgtatagaagtttgctataataacttctcagatggccagacgattttcgacagtatagaagtcgggacggatagaaaatctgtcctaggcaggcagaatgctttggtctttgcagatcattgtgtgagatgaatgatgggaaagttaaatgaggtgggcagatggttgggttaggtacgataataaatgccataggggtgctgatcggaggcattttagggttaggcttcggcagactgttaaagcagagatttcatgatattttaataagcgcctgtggattgtgtgtgatttttattggagcctccggggctttggagaaaatattggtggtcagtgatggaaaattgtccgcaacaggtactatgatgatgatcgcctctctatgtatcggggccttggctggtgagtggctgaacatagaatctcatacagagcaatttggagaatggctgaagataaagagcggaagccagggagatacccgctttgtggacggctttgtgtccacatccctgactatctgtatcggtgccatggcagtgctgggaccaattcaggatgccttgtatggagactattcccttctggtgaccaaggcagttctggatgccattattgtcctctccctcacggcatcttttggaaaaggctgtatcttctccgtgatccccatagtagtcattgaaggtctgctcaccctgtttgccaagctgattcagccattaatgacagctcaggccctggacaatctgtccctggtgggttctatcttgattttttgcgtgggaatcaatctggtatttcataacaagataaaggtggccaatatgctgcctgccctgatcgtggctgtggcctatgcctttttgcctttttagtggcggatgcacacaatgtgccaaggaaagcagcttcgcagctgtacattgattcacaaagccgtcaagccccttatgagtgaggggcttgacggctttgttctggaataaacgttcccagtatcttcgaaggagagtgttcgttgttcagcagacgtaatagagactgaaaggaaatcgaagcaatttccctttctggctgttgtacgcagataatattatcaaagaattctgaacctacaaagtcctcaaacccacctaaagcgataggcgacaggttttcctgtcgaagagcccgaagaatgccgtatatataataattagtgctcagggccacagaatcaaaggcagtcccttctttttttacaaatctcagcaattctttataagcagtctccccattatacacattatagataatgtgattttcaggcaccttaatgccagcgcactggaaagccttctgaaagcctttaatcctgagccgcacagtataatccgttttggaggtggcgataaagaggggggtgcgcgcgcctttggcaagaaattgttcaccaaggtttcttgcggcctcgtcattgtcaatagtcacagaacagtattctttattttctacagttctgtcaaagcatacaattttaaaaggatagtcctcctgaagggactgggaggcagaaactgcagagattaagataccgtctaccatacggctggaaagcattcttaatacttcattttccttatcgagattttcctcagtaatgcagatgatcaaactatagttggcatcgtaagcaaggcattctacttcttttataatatgggtatagaagggattggagatatcgggaacgaccagggcaattgttttggtgcttcccgtttttaaggacttggcaatattgtttgttacatagcccatctcctttgccttatttaataccaagtctatcgtttcctgtttgtaggattttacttttgttttatgatttaaaatatccgacactgtacatcgggaaagattcagttccttggcaatatccttcatagataccataacaaccctccaattacacgagtaattaaaacctaaaaaataaaaaacaaatcactgaatatccatgatatgccttaaaatccatatattcttactatactggaattccaggaaaagtcaagtgatacaaaagaagttggaaaattttggatatataccataaaaaacagttaatacagcaacaaaggcttgacaaatttacttgagtaagctatgataaaaccataatttacacgagtagataatggaggtgaatacattggaaactttgcttaaagccagtcatattcataaatcctttatgaataaccgtgttttatcggatattactgtcgaattacataagggtgaatgtctggcactggtgggagagaacggggcaggtaaaagtaccttaatgaagattttttctggaatttatcggatggattccggacagatcgaagtaaaagaaaagccggttaaaattcattgtccggcagatgcccagaaacttgggatcgccattattcaccaggaactgaatttgattccaaatctatcagtggcacaaaatatttttctgggtcaggagagtatgaaaaaggggcggatagatgataaggagatggtgagaaggacggaggagcttttggaaaaactgggaatacagttaaatcccagggaaatgatcagtacgttatctgtggctgagcagcagattgtggagatcgtaaaggttttatcaaagaatgcggatattattatcatggatgagcctacagcggcattaagtgcggaagagaccgggcgcctttttgagattatgaaggacctgtgcagggcaggaaaagggttgatctatatctctcatcgtctggaagagatctataaggtggcagataaaatctgcattttgagggacggcaaagtgatttctcagtgttcaccgcaagatacgccagtggagcttgttgtggagcaaatggtagggcaggccattgataattattatcccaaggaggagcgccagccaggaaaagtaaagcttcagacaaagaatctcacagatggacgtaacttttttgatatcagccttcaggtgcgggagggggagatatatggtcttgcaggtcttatgggggctgggcagacagccctggccaggtgcctatatggtctggagaattttacctccggggaacttctgattgatggtaagctgcaaagaggacataatcctggaagatccatcaaggagggactggggcttgtgacggagaacagaaaagaggaaggactgattcttccgatgaaaataaaggagaatgtgggcttatcgccatgggcgcctatctgcagcatttctggaattatttccaggtctaaggaagagcgcatagcctgtgacagtgtgaaaaattatgggatcaaggcagaatctattcagcaggaagtgattttattatcaggaggtaaccaacagaaggtggtgatggctaaggtacttaccacagaaccgcaggtagtgatattatgtgagcctaccaggggggtggatgtaaatggcaaggtggatatttatcacattatgaaccggcttttggaggagaaaaaagcaatcattctgatttcctcagagataccggaaattatcggtatgagtgacaggattgggattatttataaggggaggattgtgaaagagatgaaaaacgagggagtaaaaccagaggatattatggtatatgccacaggaggttacaagcatggataagagaaaattttggctgattgcccgtaaatatgcgacgtttgtaatattatgtctgattgtggttgtgatgtttttccttacggaccgttttttcacttttaagaatctttccaatgtaggccgtcaaatttctatgaacgcgattttaagcgtgggcatgaccatggtgataatttctgggggaattgacctgtctgtggggtctattgtggccatgagcagtgtcgtgtgcgccaaggtgctcacagatacgaatcagatattacttgccgtgggggcggcgctggccgtggggctgctgattggtttgatcaatggaattttaattgctaagacaggtattgcaccttttattataacgttatctacatcgtctatttgttccggcgctgttttggtatttactatggcaagtccgattcctctgagtaatcaagcatttaagcagctgggacaaggaagcctgctttttcttccatatccctttttgcttatggcagcaatctttttagttgctgcatttgtaatggcaaagacaaaatttggccgttatgtatatgccattggcggcaatgagagagcttcggttgtggctggcattcaggtggttcggacaaaaaccattgtgtatgtgatctgtggtgttttggctgcacttactggagtggtgtatacctccagactttcttcaggagtgcctgcccttggaaaaggccatgagatgcaggcgatcacggcagcggttattggcggtgccagtttgtcaggaggcagagggggaatttggggaacgctcattggagctgtgatcataggggtgctgaacaatgctttgaatcttctgcaggtaaattcttattaccaggatattgtcacaggcgcagttgtgttggcggcagttttgtttgaccggtttattcagaccagagtgagcagcgaagcataaaggatgacagaacagcgctggggctgttttgcaaataaaacattcttttatagaaaggaaggtattaagtatgaagaaacgagcagcgagtgtagtgatggcaactgtattggcaagtgtaacagcaatgcctgtattgggggcggatgcaggagatattccaaaggcgaatgaggaatattccattggatatacttgtcccaccttgaataatcccttttttgtgggaatgatggagggtgcccagctggcagcaaaggaaaggggagtttctttgacaatgctgggaggcgacaatgatgtgacaaaacaggtacagcaggtggaggattttgtatctcaggaaatggatgcgatcattgtacaggcagtggatacaactggaattgtgacagccattgagcaggcaaacgaggcagatatacccgtacttaccaccgcagagacacccacagggggagaaattctgtgttccattagttttgacagttatgaatccggatataacggaggaacgtatattgcggatgtattgggcggcaagggtaaggttgttgagctccagggcgtattagggcaagagacaagcagggaaaaatcaagaggctttgcagaagcgatcgcagagtataaggacatggagattctggcttcccagcccgccgattatgacagggccaaggctatgtcagtgatggaaaatatgcttcagacctttgatgaaattgacgcggtgtatgcagccaatgacgaaatggcgctgggagcagctcaggctattgaagcagccgggaaggcaggagaaattttcgtaatgggtaatgacggaacggacgaagcattggatgcggttaagcagggcactttaggtgccaccaatggaactcccggatatattcaagggtatattgcagtggatatagccgtgagacatttgaacggggaaaaggttcctgaaattatcaaggagagaaatacggttattgataaaaccaatttggatgatacagagaaaattttaaagggggtttccaaggaggactggtattggctggagcaattctgagatgtgattccatacaaagaaaagaatgatcacgttgtgcggcggggcaaagttgttccgccgtcgttaataagcaagtgaggagtgataggatgggtacacaggagtttatgagttttattgatagtcataagaaagaagctgtggaatttctccaaaagctgatttctctggacagtacctttgttgaacaggggatagacgggcatgaatgggaagcacagaagtggctggaagggcagttgaagggctgggggtttgagacaattttgtttgaaccggacaatgacagaattaagaggctgcctgatttcaacccagggcatcgttacgataagcggccgaatctggttgccatacaccggggaagtgggaagggaaaatctatcctgcttaacggccatgtggataccgttccactggatgatttgagtaaatggaggtacccgcctttaagtgcccatgaagaagacgggaagatttatggaagaggagcctgcgatatgaaagcgggactggcagctatgatgctggcggtaaagtatttaagtgattttggacttacccataagggggatattattttggaatctgtggtggatgaggagggcgggggaaacgggacactggcctgtgtagagcagggctacaccgcagatgcggcaattgtcacagaacctacgggaatggaaatatactgtgccagccgtggggtatacctgctggaggttgaagttcctggaaaggcttctcatgcatgctttaaatggaagggcgtaaatgccattgaaaaggccatgaaaatagcgcagggacttaaggagctggagattagctggctggcaggccgccacaatcccttcctgccgtctcctaccataaccttaggagagatccatggaggtatttctgccgctacggttccaagctcctgtatcatgaagtttgatgtaaagtatcttccctatgagacagaccaaaagggaaacaaaaaagaagtctgcggggatgacattaaaagagaggtagagggctgtattgacagaatctgtcagggagattcctggctgagggaacatccagttaagaagaactggtatttaagcgtaatgcctcatcatattgacgagaaccatccaatcattgcccatattcaaaaagcgggtagagaactattgggaaaaaccagaatatcgggtctgccaagtggtgcagatgcaagacacctgcagaacacggggaatattcctacaatcctgtttggacctggaaatatggaaaatgcccacagcatcaatgaatatgtatctgtagaggattatatgaatgccattaaaatattagcaagaaccatttatgactggaccaatgaataagggagggaaagaatgaaggtacaaataacagcagaagaatttaaggagagaatccgtttaacccaagagaagatgaggatggaggaacttgatctcttactgtgctatggaaatgaagcagagccgcagtttgtcagatattattcaaattactggccgtcttttgaatcggctgcggtactcatacctaaggaaggagaggcagcacttttgattgggccggaaagcggtacattttccgcctatcattcgaagatagacaaaatatataagctccttgctttccgggaatcctcagagccagaatacccaggggcgaagctggatacctttcacagtgttttggctgatatgtgccaggggaagggtatcagaaagttggggatcgcaggaagcagcctcattactcatgttatctaccaggagctgcagacggctctgaaggagcagggagaggttgaaattgtaaaagcagatttattggtatctaaattaagagcggtaaaatccccaaatgaacttgcctgtatgaaggaggcttaccggatcgcccaggaggcattgaaaaaggtgctggagggtatcactccggggataacggaaaatcagatcaagggcatagccatggcggagatctatgcccagggaggggagggagaggcctatcccttctggattatttccggtaaggataccaatcaggccatcagccgctgcaggaacaaggtggtagaggatggggacatgatccagattcaaattggagcccgttatgaaggatatgcttccacagtaggacgtcctgtccttgtgggaaagacagataaaaaatacaaagatatgatcgaagccgcattggcagttcagaaaaaaattttagaaacagtgaggccaggagttaatgcgggcgagattactaaaattcagcatcaggttttggccgacaggggatatgaacattgtattttatatggtccttgccatggcactggccttatggaaggggaatatccctggatggaagcggattctgattaccctttggaagaaaatacagcctttgctacatgtatttatctaggggacgatgaagcgggcgttggtctgcggattgaggatggcttttatatcacccgtcatggggctgaatcattttcaaactaccgcagagaagtgattcagctataaagtgaaaaaatatattgacaaagcctcctttttgctcttataatagttacaattactaacaaggaatttatatagcaaatgcaatgacagggaggagtacatggatgtctgagcccagagaggagatggctggtgggaatctccggaggacacagtggaaggtagcccttgagcagcgaaccgaacaggagggatcctaagtagacttcgacgcagttccagcgttaaaaggaagcagtatcggagaagaaccagaaaggcagtactgccccaaggggaaggctcccgtattggcagagtgcagagaggaatctctgaatttaggtggtaacacggatggatattcgccctaagctgtaaaaggcttagggcatttttttactgggaaagcggacaaaaccgcttgaggaaagaaaaggaggtctgagaatgaaaaaaatcacaggaaataagctgttagtgaaggctttaaaggaagaaaaggtggatgttctttttggatatccgggggcctgtaccattgatatcagcgatgagctgtacaaacaggattacaccagggtggttcttcccagacatgaacaggctttggttcatgcggcggacgcctatgcccgctccacgggaaaagtaggcgtatgtctggttaccagcggacctggggcaaccaatcttgtcaccggtattgctacggcctatatggacagcgtgcctctggtatgctttacgggacaggtgtccagagaattaattggaaacgctgccttccaggaagtggatataattgggatcaccagacccatctgcaaatacggggttaccgtaaggaacagagaagacctgggaaggatcatcaaggaagccttctatattgccagcacaggctctccggggccggtggtcatcgacctgccaaaggatgtgatgggagagctgggaagtccggattacccggaaacagtgaatatccggggctacaagcccagcaccggagtacatatcggccagctgaaaagagctgtgaaaatgctcaataaggcagagcggccgctgttcctggcaggaggcggcgtaaatatttcccgggccaaccaagcatttcagaagctggtggacatcacccagatcccggttgtgaccaccattatgggaaaaggggccatccccaccaatcatccgctgtattttggaaatcttggaatgcatggggcctatgcctccaacatggctgtgggcgagtgtgatgtgcttttttccatcggaaccagattcaatgaccggatcacaggaaagattcacgcctttgctccaaatgcccagattgtccatattgatattgatacagcctccatttccagaaatattcaggtggatgtgcccattgtggcagatgccaaggaggccattgagaaaatgctggagtatgtccaggaatgtgatacagagaagtgggtggagcaaattgaccagtggaaggaagagcatcctctggatatgaaagaaaaaccaggaattactccgaagaagatcatcaacaccataaatcaggaatttgaccaggcgatttttgtgacagatgtgggccagcaccagatgtggtccacccagttcctggagatcacggagaaaaaacgtctgctcacctcaggcgggctgggaaccatggggtacggttttcccggagccatcggcgcccagattggaaatccaggggtacaggtgatttccattaacggagacggagggatccagatgaatatccaggagtttgccaccgctgtgattgagaagctgcctatcatcatctgtgtgtttaacaacagctatctgggaatggttcgccagtggcagaagcttttctatggaaaacgctattccatgacctgcctgaatcctccccaggagggatgtgaggagccgcccaaataccgtccggactttgtgaagctggcggagagctacggtgctatgggaatccgtgtggagaaggaggaggacattgcccctgcctttgcgaaagccagagaaaataaggaaggtcctaccttaatagagtttattattgatgaagaagatttggtataccccatgacaaagccagggggaactctgcaggaaatgctgatgtgctaggagggaaaacagggatgaacaagaatgataaaatgagaagcagatggatttcattgtatgtggaaaaccaggtgggtgtcctgtctaaaatatccggtctgttttccggaaaatcttataatttagagagtcttaccgtgggcaccacagaggatcccacggtgtccaggatgaccattgtcacctgctgtgatgaggagacctttgagcagatcaaaaagcagttaaaccgcatggttgaggtaattaaggttattgactttaccgacctgtctgtgtgcatgaatgagttcatgtatgtgaaggtgaagcggtgtaaccgggaagaaaaagaagagctgtttcagatcgcccaggcctttggggcaagggtggtggattatggaagagacagtattctgttgggctttgttcagacagcagggaaaaatgattccgttatcaagcttttgaaggaggaatttggaaacattgaggtagtccggggcggaagtgtgggaattgaagccatcagcatgtccgaccgttgacccgtgcgctgtgaatagaaaatagtataccgtatgagcaaagaataaaacagaaagccgcagcaaacagcaggatgatcaccagctgtttgctgcggctttctttgatgccctgtcagatgtatccggcctttaccctagtgtgctggggcaggtcctatccgaagggggctattgtcagggcagataatgatgaatctgataatagtccatactgcactgggcaaaccccatgaacacggtgaacagaaccactgccagcaacagcagaatggccggcacatcgtatacaaaggtcaccttatcactgtctttgttggaaaccagaatctccagtcccaaaaggatgaggatcacgggccacagccggaaaataaaagtataagtaagctgtggaacgattaggtgtaccagcatcaggcagcccatgatcactaaaacaataccaaaggtaaaggaacccactctacgggttttcatgaccgttcatctcctctcctggggtgggagggataaaaatcacatccggttgatccttggaggaatctgcctgaggagcgttggccatgggggccgccgccatatctgttgtgtgagtagcctcagtatctgctgcgagaggagcagctatatctgttgttgacgaagctgcatctggcgtatgaggaacggtcacgtctgttgggtaaggtgcagccactggctgggacgcagtccgtggtgcagctggctggcggtagggttcgtccgcctgaggatgggggggctgttgctggggacggtagggttcccagtaatgttcctggggattgtcttccctgtcgtaggaatcctgaatggctttcttttttcctctgataagataaagtccaaggagtacaagtcccactgcgaaaagtccctgaggaagccggtaggaaagactgcttgcaaggttggccagtggatagggcaggatataccagaagaaatccatgataatgttccagagcacgcaggcgccgatcactaccattcctacaccaatgacccggcggtattttttcataaggtctgtgctgtctcccaccagactgtccaggttcaggatgaaccggtcttccagggaatagaattcttcaggacttaaggattttaaattgtgtacattgaaaaagctgtaaaaccaaaggatgggaaggaacatgataaaccatcccatattcagccctgccgccagggcgatgatgccccagaaaaggagcataatgctgattccctgtttgcggaaccccatgtacatttcccctgcaccggggatgagggagaacataaacagccagaatcctcttttttgtttgatcatagttatttgcctccatttaatattttattggtaaacccattgatggaatcggtgaaattattcatgcccctggacaggtggctgctgatgctctgggaaaaatcgtaaattcccttgtccttttcagaagggcggttttcatcggcctgctccatgtattcctgggaagattccggtcttgggatcaaagcagaaagattagacaggtcaatgtgattcatactgaacagcaggaacagtgcggcgatcactcctgcggcagtgcgcagtccgtagaaaaacagctccattttccgggaggtgttccgcatggttatggcagcctgaatatccggttcctttgcccgttccagtatctgttcttttaaataggaaggagcctgcacaggacttgtgcattcctggatatttgccagctcattcagacagaaatcgcattcctccagatgggatagaaaggcgatcatttcctctggttccatggtctcgttttgaaatttttgtaaaagctcttcattggcatgcatcctaatcactcctctccaacatttttttcagcatggccttggcccggtacagctgcgtctgtatggtttttacatttttattttccatccgggcgatttctgtcacagagagctctcggcagaaatgggcttcggctacctcccggtagggactttttaactggcagcatagctgctgcacttgagactgagaatccagagccaggtaagcctcttcgggggtactttgaccatcgggaatggaagtgaaataggtatcttccgtaggcacggtacggcggccagctgcttttaaaaagtccagacatttgtgaaccgcaatcttgcacagccaggccttttcgtaagagccatcgaaacgggaaaggtttttgtaggcggataagaacacttcctgagttaaatcctcggcgtcaaaggggttgccgattgattttaagcatagggaatagattaagttttggtaattgttaatcaaatattccaaatattcttcatgtgaaatgatctcagccccctttcctgtacccgttcacttattataacgcagaggaaaaaggattgccttcaaaaaaagaaaaatatttaaaattttttcagagcaggctgaaggttgcgggatgagggcatttcgactatactgaggaaagataaaaggaggtttcctatcaagaaagagaagctcaggaaagtatgaaaataataagaaagggacaaggagtctgaaattatggagacagtgaaattatattaccaggatgcttacaggagagaatttacagccagggtgatggactgtacacagggaaaaaaaggctggctggtggttcttgaccgcacggctttttatccggaaggaggaggacagccaggagacagaggatttttaaatgatgtacaggtttatgatgtccatgaaaaggaggggcagatcctccactatacaaaggctcctttgaaggccggagagcaggtgaaggggggcattgactggaaccatcgttttgacctgatgcagcagcattctggggagcatatggtcagcggactgatccaccgggcctttggctataacaatgtgggctttcatatgggcagtgatgtgatcaccattgattttgacggggagctgacccaggagcagatggcacagattgaacaacaggtaaatgagaaggtgtgggaagaccaggaggtgaagatcacgtatccctcccgggaggagctggagctcctgccctacaggagcaaaaaggagcttacagggcaggtgcggatcgtggaatttccaggggcagatctgtgcgcctgctgcggcacccatgtggcaaggactggggagattggcatggtgaagctgctgtctgtgcagaaattccgggaaggggtgcgcatggagatgatctgcggaaagcgtgtgctggaatatctgaacatggtcaatgggcagaatcatcaggtatcggttcttttgtctgcaaagccggacaggaccggggaggcagtgaagcgcatccaggaggagaatttccggctgagaggaagagtacttcagatggaggaggctattttcggacagactgccctgagctgccaaggcaagggaaatgtcctgttgtttgaggaaggcctggaggcagacagtgtgcggaagctggcagatttggtgatgaaatcctgcaagggaaggtgtgctctgttttcggataatggagacgggacctttaagtatgccgtaggagaagagggtggagatctgcgggtgcttaccagggagttaaacgctgcccttcagggaagagggggcggcaagcctttctttgtccagggctcagtgagagcatccagggaacagattgaggatttttttcaaaaatattaaaatagtccaccatgcttaaggatttttaatctggctttcctttgggataaggtataataagcctggaagggaagcggtttctctgccctggatgcaggcgggaaaggcggagatttctttgatatgaaggagaactggggggagagcggtgcttggtaaattactggaccattataatagctggaagctgggacataagcttctgtgcgcgtttgtattggtatcgatcatacccatactgtttgtccaggcctttgcgtttcagatgaacagaaataagatgacagagaaaattgacgagctcatggtcaataatctgactcagattgcagagcgggtgaacttgaatcttcagatttacaccaacctgatctatcagatctacaaggatgagcaggtgatcgacaatgtgctggcccttacggatgaaagtgacagccataaggctgtggcttataatcaggtcatcaaccggctgaagcagtaccacaacagtgagacaggaatccgctgcctgagtgttgtgtgtgcggatggaagtgcagtggtctatgattttgagacagattcttctttaaatactgtgtggcacagctataaggacctgcggcagatccctccttaccgggaggccatcgatgccccgggcatggtagtgacagacaccatggcctttcagggaagtgagaactccgggcattttttccatatatccaagagattgtttgactttgaccatctggaccagggaaccattgccactgtgatcatgaccatagaggagcggatgctgaataccatatgcaacaataacggggatatggcagaccggagcattaactttatcatcaatgaccagcgaaatgtgatctcctatcccgatgaagatttcactggcatggtcatgaatccagagctggatattgagaatttcgtgaaggtatccgggtatctcagaaaccaaaatatggccattaaccagtatgaggatccggtgacgggctggattttctgcaatgcctatgacaaggattatatgctcaaggatatctcccagacccagacgatcttagttaccataaccatccttgtgctgatttttgcatccatcctcatcctttatactgtgcgtaccctggatgcctctgtgcggtccgtgctcagaggaatgcagcaggtacagaagggaaatctggatgttgtggtgccggtgcgttcctttgacgagatcggtaccattgccgacaattttaatgatatgaccgttaaagtaaaggagctgatccaggaggtgggggaggccaaggagcagcagaaaaatgcagagatccgtgccctggaggctcagatcaacccgcatttcctgtacaataccctggactctatcaattggatggccattgaaaaggaggagtatgagatcagcaaaatgctgcggaatctgggtgtgatcctccgttacagcataaataagagcaaccagatggtcacgatccgtgagctgtctgactggctggggaaatatatcagtctgcaccaaatgcggttcaacaatgcattttcttatgacatcaatgtggatgagcgtacctatggaattaaggtgtataagcttctactgcagccctttgtggaaaattctattatccatggatttaaggagatggagagcgggggcttcctgcagattgacatttccatgtccctggaggacaaggggatcaccattattatagaggacaatggaaaaggaatgcctccggaaatgctcaagagctttaacaataaggaagaggctattaaggatgacgggcgcagcattgggctgcacaattctttttccagaatgaatatgtactatggggacagggcgtcctggaacgtgagcagcatagaaggaatggggacggttgtcaccctgcgtctgcccctgctggaggaggagtctgaatgagaattttgatcgtggaggatgaggtaaagattcgtacaggtatgtcaaagctgatctctgcccacaccagtcataccattgtaggggaggccaagaatggaaaggaaggcctggagatgatcctgcgcctgcggcccgagctggtgatctccgacatccgcatgccggttatggacggtctggagatgctggagcaggtggagaaggcgggggtcaaatgtcattttgttatactcagcggctactcagagtttgagtacgcccagaaagcccttcgctacggagtggatgattatctgctcaagcctctggctccggaggatgtgaccgcacttttggataagattcaggccaggctggaagaggaacagaagcacacagcagagactaccgagggattgatccggagctttcttttaggcagcaaggcgggcacggaccaggattatgagcgcctggagaagtcaggaggatttgtgaaaaataagccctgttatctggcagccgggtatctgggagacaccaacggaaggtatgtggcagggctggagcagcagatggagcatctgaaaaacagtcatccggattacttggtgtattacctgatgctggacaatactcaggaaatgttctgccttattcagggggaacttacggtggaggagctggagaaaaaacttggccgcagggtgtatctgaatgtggataaggaggatatgcccgtgtggaccttgggagaactgaaggggttgtcctccatgggaagggtgtgccaggagctgcgggagctgtacttatacgggatccttttaggataccgcaccatactcaccaaggagaagacccaggtcctcacagaaaaggaataccagtatcccaagcatttggagagccagcttcagacatccatctgcagcggttctcctgagcggctgagaaaggacgcagctgccttcgtggactatgtgcgggcgcttggctgcagcccccagtattacaagagggcctatgtaaagattataacctttatggagaatgtgtgccatgaaatgaaccaggatgcctaccgcctcatgcagagccaggatatggaaaagcaggcggcagatgctgtcaccatgggagagctggagcggtgctttcataaagaaatccagatcatactttcctttaaggacaaaaaagaggacatccgaaactacaccatccgccgggccattaattttatcagggagcattacagagaaaatatttctctggagcttctggcagattatctggagatcacgccggaatatctcagcacgctttttaataaagaggtgggaattaatttcactacttttttaaaacggttccgtgttagccaggcaaaaaggcttctgaaaggaacagataagaagatttacgcaatcgcagcggaggtaggctacaatgatcccaagtattttaaccgggtatttaaagaagagaccggagtctccccgggagactaccggcagctgcagtaaaggaaggagccgcatgaaaaaatcagcgatcgtaggagggatcctttttctgacagcagggcttttggggtgtgcttcccggcctgttcaggaggaatccaacagccataagccggaggagattgtgatctggtcctattatgagactcaggcgcagagacaggggctggacaagctgatcagagattttaaccagtcccagaacagctatcatgcctcctgggagtacgtgcctatgacaggatttaccaagggactttcctccgcctatacagaaaatgacctaccggatatggcaattttggacaatcccgatatgcccacattgatacaattaggtctgtttgaggacattaccggggaagttgagaactggaacctggatcaggaattttatccctccattatccagacattggagtatgaaggaaaatattacggcattccctttaactgcaacagcacggctttgatctataataaggaggtgcttatggaggctggtctggacccaccatccacctgggaggagctgaaagaaatcgcccgcagtcttactacaggggagcggttcggcttttccatgtgctgtattgaaggggagcagggggcttttcagatcttgccttggatcctggctgcaggagaagatcccgagcatctggggggagaggccacctgggaggcgtttgcctttttacagagtctccttgaggacggaagtttgtctgagaactgtattaacctgacgcagacagatctggccagggaatttgtggaaggccgggctgccattatccagaacggcccctgggtttttccaaagttagatgaagccgggattccctatggcatcatccccataccagggaaggagaagggaaatgccgtgctgggcggggagaatatcgggattttgaaggggaaaaatgtggagggttccatggaattcctacgcttttgcatggaaacagaggagctcacagaattctgccgcaaggccaatgtgcttccggctaagatccgtgctgctaaggagtctgttcaggcagatgaacggatgcaggtatttgaagagcagatgaacacggccataaccagaacctccatcccccagtgggcctctgtgtcaaaaaagcttacggacggcatgtatcacattgtggcaagggaaaagacaccccaggagatcgcccgggatttttccaccaattgacttgaaatatgtccaccattcttaaattattagaattacgagagaaaagaacctcccttataatgaactcaacagcaagagagctgaagaaattcattaaagggaggttttacaatgaaaatgaagaaagtgctggcagccggactgaccgcagcaatggcctgctccatgatggcaggggctgcaacaagtgtagcagcagacgacaagaaagaagtagtgatctgggattattttgagacagatgcccagaaagaaatgatgcagaccttgatcgacggatttaatgaatcccaggaagagtatgtggcatcccatgtatatgtacccttctctgattatgagaaacagctcacccttggtattgcatccggggagcttccggatctggttatcctggacggctgcagcatggcatcctttatccagttaggacttttcggcgatatctctgatgcggatattaactgggacgagtacattgcaggacctatggaatccaccatgctggacggaaaacattatggaattccatttgcaacaaactgtacagcactttattataacaaggatatgtttgatgccgcaggcattgattatccagatgaaaacactacttgggacgatttccgtgagatggcaaaagcccttacaaaagacggtgtgttcggattcggaaatgcagctaccaacacagatgaaggtaccttccagtgtctccagtggctgtacaccgcaggcggttcctatacagacattgagagcggagttgacgcatacaagctcatgcaggaaatgattgaggaaggctcctggacaaaagagtgtgtaaactggacgcagtctgatgtaaacaacaactttatggcaggaaacctggctatgcagcagaatggtccatggcagatccccggaattgaaaagaatgctcctgacttaaattacggcgttacggttcttcctaaaaaggatgcggatgccggtcaggcaacctccatcttaggcggcgagaacatgggtgtagtaaacaaagaagatatgtccggcgctaccgcatttctgaaatattatgatcagacagaggttatggtggaagccatgaagcagtatggttcctatcctccaaaaacagaggcagccaaggattcctactggactgatgatcccatccagaaagcattcctgacccagattgagacttctatcccaagaggacctagcgcatcctggccatcctattccagcgctattcagacaggattccaggaggttatgacttccgcaaagactcctgagcaggcagcaaaagatacccaggcagccgtagatgcagtgaaataagacaagtaaaaagatgcctctcaccaggtgcagaggcatctttttttctgaaaaaaagggggcaaaagaatgaagaaaaaaggtaaattaaacggtggagcaaagatgggctttctctttgctcttcctgcagccatctatatgctggtatttatcggatatccgatgatccagaacctgatcctgagctttaaaaacgtggatgtgtattcctttgcacagccggacaaccagatctttgtaggtcttcagaattacattgaactttttaccagcggaaattccattttaacaaaagccattataaatacacttatctttactgtaggatccattttctttcagtttatcatcggctttggacttgcacttttatttaataaaaagttccccggttgctctttcttccgtggaatgaccatgatttcctggctgcttcccgtgacagtggcaggactcttatttaagtttatgtttgccagctctggaggtattattaaccagttcctggtctccttacatatcctggaccagcctatggagtggctgcttaaaccgcagtcggctatggtcgccatcgtagttgccaatatttggattggtattccctttaacatgatgctgctgatcactgggctcaccaccattcccactgaggtatatgagagctgcagcctggatggagcaaacaaaatacagaccttatttatgattactattcctatgattaagcctgcgatcatgtcagttttaactctgggatttgtatataccttcaaagtatttgacttggtttgggttatgacaaagggtggtccggtgaattctacagagctggtctccacctatgcctatcgtctgtcctttgaagaattccagttcagtaagggcgcggcagcggccaatattctgttcctgatccttctggtggtaggtattttctatattaaattaatcaatgaagaggaggagattatgtaatgggaaaaaaagaacgacggagtcagataatcgcctttatctttggagcgatcatatttgtaatatttatatttcccctgtactggatggtagtaacggccctgaaaacccaggttgagatcttccagatccccactcctctgtggccaagggatctgacgctggaggcttttaaggctcagctttctgcctccagtgataccttgagaggttttaagaacagtgccatcatcgctgtaggagctaccatcatctctactgttttggcaattcctgctgcctatggattggcccgcttccgctttggagcaaagaaagcattgatcttatttttcctgatcacccaaatgcttccatccaccctggtgctcacctctctgtacattatgttctcaaaaattggactgctgaacacctactgggcacctattctggcagatgccactctgggaatccctttcagtatcattatcctgagaacttactttttatccattcccaaggagctggatgaggcggctaatatagacggctgcgggtattggaagtccttctttaagatcatgctccccatcgcaaagcctggcgttgtggttgccgcagtattctcctttgtgtatgcatggggcgatctgatctacggtatcacttttatcacaaaccccaacatgaggcccatcacctccagtatttataattatgtacaacagtatcagaccctgtggaactcaaccatggcatttggtatcatcgccatttcgcctgtggtacttatctttatattcatgcagaaatatattgtcagcggcctgaccaatggagcggtgaaggcttaattacaggaggacattatgagattacagtcattggatctaaatcaaatttccataaaggacagcttctggtccaagcatgtggacctggtgcgaaatgccattattccctatcagtgggaggccatgaacgacagaatcccggatgcccagtccagccattgtcttgagaactttaagattgctgcaggaagagcacaaggtgaattttacggggcagtgttccaggatacggacgtggcgaaatggctggaggcagtgggcttttccttggcctgttatcctgatgaggagctggagaggactgcggatgaggtgatcgatcttatcgcagatgcccaatgcccagatgggtatattaacacctattttaccataaaagagccggataaacgttggacagatctgtgcgagggccatgagctctacaccgcaggccatctgatggaggcatctgtggcttattaccagggaactggaaaaggaaaattcctggactgcatgtgccgttttgcagacctgatctgcgacacctttggctatgaagaggggaagattcatggatatcccggtcatgaagaggtggagatcggactgatcaagctgtaccgcactaccgggaacagaaagtatctggaccaggcgaaatactttgtggatgccagaggcactggggataattatttcatgaaggagctggcaagaccggactaccacatgatctttcccgaatttgcagattatacccctgcctattcccagtcccatgttccggtgcgggagcagaccacagcggagggccatgccgtgcgggcggtgtatctgtactgtgccatggcagatctggcagaggcctatgaggatgaagggctgttgaaagcctgcgagactctatggagtaatattgtagaaaagcggatgtaccttacaggagggatcggttcttctggaattttggagcgctttaccgtggattatgatctgcccaatgaatacaattattcagagagctgtgcatccattggtctggcattattcggtctgcgcatgaaccagattaccagagaaagccggtatgtggacattgtggagcgggccctatataatacagttctggcagggatcgccctggatgggaagagctttttctatgtgaatcccttggaggtgtggccgcctgcctgtatggaaggaacctccaagaagcatgtaaaatccctgcgtcagaaatggttcggcgttgcctgctgtcctcccaatattgcccgtacactggcatctctgggtcagtatatatatggagtggatacccagagacgggaactttatgtaaatctgtttgtgtccaatgagtccagtgtgcagatgggagacgatcagattcagataaaactcaagactagatttcccctggagacaggcctgtgcgtggagcttgccggcgtaccgcaagaaggcgtggacgtgtatgtgaggatcccggattatgcagagaattaccaggtggaatttcaggggataaagtcggagctttgtcctgaaaaaggctatcaaaaggtacatgccgatcaggatgggaccattgaagtgaccttccaagcaccagcaaaatttatctatgccaatcctcaggtacgggcggattccgggaaagcagccattatgcggggtcctctggtatattgcttggaggaggcagacaatgggtcgaatcttccggcagtctttgtagatacagaccaggaacttgtggaagaaccctcctctcttttaggcggcatcacggtggtaaaagccaagggaaagaggctcgtgcaggaatcctggcagggcggcctgtacgctgacaaaagacccaggcttaaagatgcagagctcacagccatcccctattgctattggaataaccgaggcgagggagaaatgctggtgtggatgaaggagctgaatatccagtaaatgtgagaacaaagcgggcctgcaggcttccactctccctttccttattcctgagggggttaacggttttgtgggccaatgtgcggctgggaagcagttttccttaaaaaagtgctgtcttatagatatatacaatctataaggcagcactttctatgttgggggtctttttttcaatatgtaattgtgaaaaaagagatttaagcagcccgttttttcaatcccatggccgtcatgttggtcaccattgaagtgagaggactgaagtaaagaatacaggtgagcacgcagtaaatcgggctcatgatacagaactgtaccaaacgtccgggcatgatggcatagaagttatatcccatgatcaataccaggcctgctgtggtgaaaaccagtgagctgagtacagccgtaatgatgatccagatggacagataagtcatcttgcggcctttccctgctgcttttccataggaagagcggaacagagccgggatcacaccccatagcacagcggccagggtaataaatgggttgatggcataacctttcataaagcatcctaagatgtcagcagtgagtccacagactcctcctgcaacaggacccatccacagtcctgctaaaatggtacatacgcttcccacggaaatacggtatgcgcccagttcgatcacaaacacccgggtcaatacaaggtgcatggctaccagaagggccataaaaaccagggtgcgggtgttccagtgtgttttcaggttgtttttctgcataataaaaacacctccataatgtaaaataataggttaccataaataataatccctccacattatgaggcgtcctcatatatgcagcaacgggtgcggaaaatatatcgtaagccacaaaaacggcgtttcgtggtcttttcgtttcacggcgactccccatccaatgaacacttaacgcataaattcctacttcgctattatttatttaagtgaattatagcataatccatggaaatatcaagagatttttgttataataagacccatcttggagcatgctaaacgacagaggcagatgtgcctttgtcaggaggtgtgaacaagtgtcaaagcaggaaaataatagacaggaaaatccctatcaggtattctatgagaactatatggataccaacgcctgcacggagtgtacagggctcatacctgaatactcggacgggagagaggactgggatgagtatcatgaaatttttgatttcacgccaaaggcagtgaatgctatggatgacggaaccctggattaggggttccgtctgagaatcaacgggaggttataggatgaaaaaggggttcatactgctgatgggagcggcagctatgataatgatatccggatgcgatcgggaggatctgccggacatcctgaatcaggcccaggatgtcaccgtatctccggcagcagcaccgaaggagagggtttatattgatgagatcaggggaaccctggaggattttgacggcaaccagatcactctgatgacggacagtgaggaaacttattattttgatgtttcggatgcctctctggaatgcaaggcaggaatgatcgtgggcgacgagatcagtgtgatctacgaaggacatctcaccagcacagataccagccaggtacatgccctgaaggtggtggacgaggtacataagaaagaagatgtacaggagaaaactgcccagggggagattcagtccatcacttccaatgccctgactattaaaagtaagtccaataaagtggctacttatcccataacaggggcccggcagtattatcagaacggactgcagaaagggacctgggtgtacattcactatataggaaggcttctcccttcccagggggaggatgccaaggttctggatgccacccacctgaaggtggtttgggtctcggatatggaaaccatacagcctgcaccgccggaaccaacagctacgccagcgcccagaacacaggatgctgaagcacagccggacaagggctatttcggggggactgtggctggaataaacaatgaaattttagagatcatgcctgatggaaagaacgcagccagaaaagtgaatgtggagaaagcaagggtgagctttgaaggggggatcgccccgggaacccatgtgacggtttggtatgatggggagatggggcaggactcagtgatccaggcccgggcagtatacggagaagatccggtccgccttcgtgagaccgatataaaaagttctgtgaccggagtggtcacaacagtcactgcaaatacagtaaccattcagacggacgacggagttcccatcacctgtgatattacacgggccaggaatcgtacgtctcagggaatcatacccggaggaagagtatctgtgatcttccatccggtagagtctaaggggacaaatatttatgtagggctggaggtggcagatgcttaagatcagcggcagaaccgccgcctgatctcttcttcccctttgtgaagccaggcatccactgccggggaggagcccagaattttataaaaggcctggagctcctggcagatgccggctccgtggaagacccggtaggcccctgcatcgctgcccagtgccaccagggcacgcttttcataggcaaggcgcagggatttctctgctttcttggcgattttttcaataagggtatcgtcataacggccggaaccagagagatttctcacggtaaccagggtgggaacccagatggtaggactctgggcaagcatggaaatggtttcttcgtccatataattgccgtgttccaggctgtccacccctgcctggatggcatcctgggcggcctgagcgccgttggtatgactcatgactgcaaatccttcttcatgggcaatgtggatcatttcctttacttcctggaaggagagcggttcaccggttatttttcctttgtctgaaaagtccagcagaccggttgtcatgattttaataaagtccgccccttcacgggcggctttttttactaattgatggtattccttcatattgtcaaagccaaagcctacgatactgccataatgtccgtttttgtgaatggcaaagacaggagtgcggtagtccagtccatactccggggccagtcctttggctgtaccggaaacactccggccgtctccgccgtcccgtataaaggatacatggtggtctacataggcctgcaggtgtctgcggataaccggaatctgtacctcatccctgtgaaggtccacggcgctgcggtaattgattccatccatgatcaaatgtgcatgacattctccaaacataacgatttcctcacttctctatttattcgtatggatcaggtattgggcgttgtccagcaaggcagaagccaataaatgatggccctgttccgttaaatggataccgtccacggttacattgtccattcccaattcctctgtcagccgtttcagtggctctctgagagggataaaacgtatattatattgagcggatgtccgttcaatgatgttgcacatggtatctaacagtggaaaccaggtgagatattccaggggccagggaaaaagaaagggctccatggtacagaccgcttttggggaaaagctttttatcacctttaaaagcaacccatagtttttggcaaaggtttccatcatttgcttctgctgagcaggggtgcggtctgtatttttcatcaggccaatatcattaattcccaccagaacagtgaccacatccgggtggcaggcggtaccgtgcagggcagcactttccaacactctggccagggtaaaaccgtccacaccccggttcaccacacgtatctgtggttggtttttgttcagaatatgggagagcattttcacatatccgtttccaagtccgtccggcgaaaaattccgtccggcgtcagtaatactatctccaagacagagccaggtattcatagaggactccttttcctatggttttccgtcatttaagtgtagtacgtttttccataaaaatcaattagaaataagcggctggtgaaggagataaaaaagtttaactttactcttgaccctgacggggcgtcatagtttacagtaatcttaacttgaacaagaacaaggaggtcatacagcaatgagaaccgtaaaggaaatatcagatttaacaggtatcagtgtgcgcacccttcactattatgatgaaatcgggcttctggtgcccacgcataaaagtgaggcaggataccggctttatgacgataaagccctggaaacactccagcagattttatttttccgggaatttgagcttcccctaaaggaaatcaaggctgtaatggagaatccggctcttgacaaggatcagatactgaaaatgcagaggaacctgctgacagcgaaaaaagaacgcctagagcgtttgatcgccagcatcgatgacattttgaaaggagataacaaaatggactttgaggtgtttaataaggatgatattgagaaactgtgggaatctatcatggcgaatatgccagaggaccaaaaagatagctttctgatggcttttgtggatagcagcacagacctgtcagagaaagaaaaaaatgaatttagagaaaagggcgtggatgcccagaagttccgtcagctgtttataaaaagtgcttccaatgaaaaggcacaaaagaattttcaaaaggtactggagtggtacggggacaaggagagcgctctcaaggcgggaacaaatccgaaaaatcctgagattttccaggcttaccagaaccgcctcaatgaggtgattcagaaaatcgctgataagcggggagcggatgtgaattcttttgaagtaaaacagctcattggggagtatgattttgtaaccaagcagctctatcagatgaaggatgcgaaagcgctgctgttagatctggcaaagctttatacttccaatgaaaaagccatcgtatccgtagaccagcagtatgggcaggggactgcggactttttcgcaagggcggtagaggcgttttataaaagtgaataaagtatagccgggtattccggtattttaaaggcgtcagcggcagatgtgcctgatcaggcaaaagaggcagcggcaggccagttggagaggggattttacttccagcaggcctgccgtttttgacttcttaaagacctgctgagggctggcggtatacttaatattagaagaggttgatggatatcccttgacagtaggattcctatcttatagtatagtgtatatacacggattaaggcggtgtgagtttatggtaaacaatgtagaagaggttgggaaagaatgctattgccgcagactgcgttctattacagctcaagttacgaaaatgtatgatcgatatttgaaagaagctgagattacctgtcagcagttttctgtcttggaacatatacgagcggcacagccagtatcagtcacagaactttctagaatgatggggctggaccggacatctttgtccagaagcttgaaaatactgcgggaaaacagattgatcgaagatgaaaaaggacatggaagaagccgggcaattattctttcaaagaagggagaagaagtacttggtaaggcagaaatacagtggggtcttgcacaggaagaattagaaaaagtgattggcattcatcagctgcgctgtttggaagaattggaaagaacgctctgtgaggttacacacaatgggcccaggaaacctgcatagccactgcacattgagacacaaagctggcaagcttctcataagtggagggagggacagttgaagtggacgtgtttgttttgttttatgaaacgtgtatatacacgaacatgtagaagtgagtttgtacatcaaagaagctgtccttgatcatcaataaaattttcagggaccgtggatttgataattgtggtaaaagcctgggaaaatgtgccaagagtgctttatagttccgggaaaaacagaaaataattagggatggttgggaaaagggaaatggcaatatcaaggatttcaaattatgatactatgaaaaataggatgagcatggaatttttgaaatatgatcaggagaagatgatccaaaaattttcgctgccttacgatgagaaatatatttatattcgttttgtggaaagagattataggattcgtcgagatcatggaaaggtagaatggtcagaagatggttttaggtctgtaaaagaagctggctataatgaagcaatgacaatttatgatgtgttgtgctattcaaaggaaaactgcaggctgtcgggaaatttttgttctgtaaatcgtttaaagggacttgtgggatcagcaggagaaggaaccagcttatttcagcaaacagcagattcctttgttgggaaaacggcgatccttcaaagagctgttgaacaaattggaaataagacctatttaaaaggagatgtttccgcaagaattcaggtatttgatttcctccctgtcagttttcaatattgggatgcggatgaggagtttcaggcagttttaaaatttatggtagatgaaaataccttggattttatgcattttgaaacggtgatgttcctgttgttccatgtactggagagaattaaggaatgtatggaagagaggacagcaaaaaatggagacagtcgtaatatcgtgtagttctcttgcaaattatatggaagttaatgagaggaagaaaaggtttctggtatgaaggggattctaaggggaggtgacggagtatctttccttcttcagaaaacagatggataccgaatttgaaaaaggagacatttgcttaagaatggggatttatttacagcaaaaaggaaaaggagattatgaatatgaaaatagcaattatttacgcaagtcagacaggaaacacagaagcagcggcagaatatatcatggatggtattttgggaaaatatccgtttattcaggtgaagatgatgaatgtgggagagaatgaagtggatctggaatttttagagcagagtgaggcagtgatttttggttctcccgtctactttactgggatgagctgggaattgaaaaaatggtttgatcaaagttttcgtattaaactggcagggaagctgggaactgcttttgtaactgctcagtccctttcggggggaaccgatacagcgattatggatattataagacatatgttggtaaaaggaatgtatgtgttttctggtgaaggcagccagtccattggtgcgtttcaaattggagtggtggtgcgtggaagcgatttggatacctatgcagaacaattggaagcattaggggcgaatgttgcagaaacggtggttcactatggaaatagtggaaattaactttgtgtgaggatcaaaaaacaataaaaaaattagcactcacctcttgacagtgctaacaatgtgtgttatattacagacataacaaagaaacaagcaattatcctaaaggaggaattgattatgatcacaagaagaaataattatgggtatgatttatttgatgagcttttcaaagatccgttctttaacaatacatttgacagacgcgaaaccagcctgatgaaaacggatattcaggaaacggatgcagcttatgttctggatatggagcttcccggatataagaaggaagatgtacaggcggagctgaaggatggatacctgaccatcacggcaaacaaaaatactaccaatgatgagaaggataaagaaggccgctacattcgcagagaacgtttcagcggaacctgcaagagaagcttttacgtaggcgaggatgttcgccaggaagatattaaggctgctttccaggacggaattttacgcctggctgttccaaaagaagtgcctaagaaaatcgaagagcagcctaaatacattaccatcgagtaattttatcttaatagatactctcactatcccctccctctttgccagggccgttttagacggccctgtttttttattacaaaggaaagttcttagaactttcctttgtaataaaaaccctccaggggatgtagaaagctgtttcgcagctgcacatgggcgtacaaagctgccaaactcctcatgagtgagaggatggggagttgaagcgggcttgcccgcttggtgttcaggccacaatcttgccgtcttcgatctgcacaatctgatcagccatctgtgcgatttctgggttatgtgtgatcatcacaatggtctgctgaaactcccggccggtgagtttcagcaggccgatcacgtcatttccggtcttggaatccagatttccggtaggttcatccgctaaaataatggagggcttggacgccacagcacgggcgatggcaacacgctgctgctggccaccggaaaggttgttgggaagactgtccagcttggtgtcaagtcccagcatttgaaccacctgcataataaaattcttatctggtttctgtccgtccagtgtgatgggaaaaataatattttcccacacattcagagttgggatcaggttataattctggaagatgaagccgatcctgcgccggcggaaaactgtaagttgctcttccttcagcttggataattctgtgccgtctacggacacactgccctctgtggggcggtccaggccgcccagcatatttaaaagggtggattttccgctgccggaggtccccacaatggcaatgaattttccctggggaatgtccaggtttacattgtccaatgcccgcacctctgtctcacctttgccgtaatatttcttcaaacctcttatttttaaaatcgtatgattgtccatatttgaatcctcctgctttgacttttttatagaactttttgttattcagctatcctcagcttttccaccatgcttcccttgttaaacagctttaatgcaagcacagggacaagggccgccgtgatcagcagaaccacacaggtgatcacagcagggatcagagtgaactggaaggtgaactgccacatgcctttaaggagccccttgactaaggttatgtccaggatcgctgcagcgataaaccccacagcagaggctgccaatgcgtaatagataccctccagcgtcatcattttcgtgagctgcttgtttgtcatgccaatgctctgcatggtggcgaactcgtgccgccgggtaaggatggaggtgataatggtgttgatcaggttcagcacccctgcggcgccgaagattatcccgatcaagccgcccacaaaattgatcatatcccgggtcttctcggaatttttcctgaaggtgtcggcagacgcaaagttgatagtggtgtcttgggtctccatgtaatccgtgaggaattgggtcatgttttctcgttggtctttctccacattaaaggaatatttataaattgcaggcgcatcgtaaatctgttcatagatggaggagggaaggtagatgcttggtgcatcaccgcctaccagaaaagggcctctggaggtataacccacttcctcatcgtcgccattgatcactgctttggccagtacagggagttctttgaagggctggccgtccttgtatacactgatcatatcgccaatgtccagataattgaagtaatccagcatttccatggtccgtctgtctgcattaatgcccaccagaataccctggccatttttcattttttcataaagaatatgaggatccgtttccccctcctttagatccattctggaaattgcgatttcctccatgccatatacattgcacaaaggacgtccgtccgttcccaggggaaggtagagccagtcttcggttatgccgcaggtaagtcctgtctcttcttcgaaatagctgtcggtaagcgtaagtcccacatcataggttacatttacatcttccagggtgtttttgtaaatggaagagccctgggtgactccgggctggacagctatgtcctttatagtttgactgctgagagcctggtcccggtgagtaaatcccttttccccattcatgcttgctgcattaactacacagaaatcggtgcgtatcataaatgcaacctgtttttccacatccaggctgagggcagcagtaccagcacagttgagaagtactacgcacagggtaagagagattacaataaaggcgctgcggcgcttgttccgtccaagattggacagggccagacggggaagacttgcgccggtcatgcttttcttggaggtacgtttgccggtggaattttctacataacggtatgcctcaatgggaggaatattggcggctgcccgcacgggttttctagtgctgataaatacagtaaatgcagttaatattcctgatgccagaaagatcaatggggatggagatacttctacggcaatattttcgtattgtacagaaaagatattcataataaacggcagggcggaccttcccacaaagaagccgatgatcagtcccaggggaataccaatacaggaaagccacagggcctgttcattgatcagtttttttacctggcgccggctcatacccacggtgcggtagagaccgtaacggcggatctcctgcattacagcaatgtcaaagacattgtagatcagcagataaccacagaaaataaataagatcacaagggttgcacctatggggatcgtagaaggatccacagagggattggtcattgtatttacaataccgggaaggtaattatcagcgcgcatgtcagtgggatttccaccctgctggatgatccaggtatccattttttcctgaagattcaatgggcttacggcagtaaagtcagaccaccaggttccggccagttccttatcctgtggataggtgtactgaaaaatttcagggtaggcatcccggaaactggtaccggccaccatgaagctgatttggtcattaatagatttataccagccggataccaccatggcaaggctgtagctgtggcctcggacggtaaattcgatagtgaccggcgccccgatctcaggctccacgcccagttctttcagagcaagatcagaagtgacgatttcattggccttcattggcatggttccgtggctgggattgcagaaggtaagtctggcctgtgtttcgtccataacgtccagctccacattgtggcggacagtgttggaaagaaagcccacgggcatgcgcagcccatactcttttataaaatctgcatcctccagcgcctcatactgctgggcgttcatatagcgcaggtctgcgtcagagcggctgcctttgagcatctgcatggtcaaagtcatagactggacagctcccagaccgatggtagacacagtggtaaataatatggccgtgagagcgattgccagtactgcgataaaatttctcatccggctggcggcaaagctgcgcctggccagaaggtttaacatatttttcacgttggttcctccttgtttgctttctgattaacagaataacaggcgaatgttacaaatggggtacaggaaaggtacagttctgtacctttgagaggatagacggagttaaagatcagaatttccctgcagggaaggggaaggatgccgggaaggagacacgccgcagacagtactctctgttattggacaatcttaccgtccttcagctccactacccggtgggcaagctgggacagctccagattatgagtgatgagtatgagcgtttgatgaaaggtatctgcggtgattttcagaagtgccgcaaccctttgggtggttttggcatcaaagcttccggtgggttcgtcagccaggacaatggctggttttgtgatcaatgctctggcaatgacggtacattgctgggcacctccggacaacatgtaaggatagcagttcagctttttttccagccccagcagctctgttaaatgggcaaaaaatgtcagatccgctctggaatcatcaagtgctaaggggaatagaatattttcctttacagtcaactcagggatcaggttataatcctgaaaaataaagcctgccttccgtctccgatacagagtgagctggtctacggtgagctgggacaggtccacaccgtcaacggatacgtgaccttctgtggggctgtataaccctccgataatatttagaagcgttgttttgcctgagccggaggctccgatgatggcagtgaatttccctttttcaatacacaggtcaatcccgtccagggcctttatctggctgggacctgtgccaaaatatttttttaatccttgaatttttacaatgtccataggtatcctttctttattgatccataccagtcagcttaataaaaatacagagaaagtgctgcctttttctggtgtggatttcacggtgatatatcctttttgccgggagatgatcccacgggccagatacagtccaagccccacgccttccttggaggatgcttcctggcagcggtaaaaacgctggaagatgtggttgtaatgggcttggggaattcccatgccggtatccgtaatgtctatccgggtgtagaactgccatggccgtacatttatttggacagagcctccaacaggagtatattttactgcattgtccagaatgttgcccagggcttcgctggtccatttgggatcatgctttaccatgacagagctggaacagtttacttcaatcaggatgtccttttgctcggccttagcccaaaccgtgctgactgcctgggcgatggtatcatataggctgcagtcttttgggtgaaggctgaaggttcctgtttccagccgggacattttgatcagtgactgcatgaggaagtccagcttatcgatctgagccgccatggtttccagaaattcctcttgtttctctcttggaagagtatgctgccggagtattccggtgaacatgcggatattggccacaggagtttttacctgatgagaaatgtcgctgaccagctcctggatggtctgcttatcctgggcgcattgctgctgtccctcactcattttttcataatattgtatcagctttccctggaccttggctgagacggtatcctcatagggctgataattttcaaggccacggccttccataagtcggtcaatggtatcacagatatcgttggaaaaatcagacagccggcgtcgctgcagccagtcccagattatagtcagtgatatcataagaatggaaaaagcaaggagtgcaatgggaaggagcttaccaggaatataatcccaaaggatcgctgcaagacccagaaggcatcccaggagcagcaggatttttttaattacagctatgtgtttatcgctggtcatagagactctcctgtccatacatatcccatgccccttatggtttttatataggtatggtgtgtatcttcaatcttggcacggaggcggttcatggttacggtgagtgtgtggtcgtcaatataattttcatcacagtcccaaagcttttccaggagcagccttcttgtgacaatgctgcctgcgttggcggtgagtacccgaaggagcttgtactcattgggggtgatggagagcttctctccattccgggatgcagtcagggactcaaaatcaataaggagacagccatcctggtagctgtcccgggaggtccgggcagcgggagttctgcgcagagccacctccaccctgcgctttaatatctgaaggttaaagggcttggtgatatagtcatcagcccccaggtcaaagccatttaaaacatcctgttccaggtcattggcagtgagaaatataaccggcagatctggcaaggcttccttgatctctcggcacagttcaaagccgtttccgtccggaaggtttacatctaaaatggccaggtgaaaggaggtttcctttaaaagctgccgtgctttctgacagctgtaggcagcggaggttaagtatccgctggtatccagctcaaagcatagaccagcgctcagggccaggtcgtcctctactacaagtatttttatcatagatactcctttattgttgtagataaaccggaggaggttcttatgaaatggacctttatccagtaattcagccgttgtgtttgcagaaaaaaattcggccctatagtataggaaccgaatcatattatagcagagaaatgtttttttgactatgaaagttcatgggattccaagtatatttatgtggattccctatgatacatggagaaggagacactttttggtatcagcaggagttcctgctcctgctgataagcagcgatagctgctatgaggttaagagaaaccggtgaatcagatttggaatatttgctttgattaggtatggagtattattttagacgctgtctggtccatcattcttgaaaagccttcttcatatttttctaatggaaaaacatctgtaatgatggatttcaaatctaaacgtccgcacttggcaagggccagggtatttctccaggattcttgattatatcccatgtggccccgtatagttatagattttgatgcaaagttgtccagactctcgtcaaaaggcttagggctcattccaatccggatgatcgtcccttcatttcgcacaatttcaattgcctgttttgtaacaatgggaacgccggcggcatcgaccgccagggcaaccccattttcaccggaaatttccagtatattctcaattaaatctggggtttcatcagataccaaaagatgggtggccccatactttctggcaactttaaaacgggttttcttgtcgttggacattcccaccaggataacattggaggcccctgcgatagaagccatttgtactgacatgagcccaagggcaccggcaccaaatacaaccacagtttctccggcatgaagcctgccctcctggatgactgctttataagcatttgcggcaggctccagaacggtggcctcttcaaaagttaaattttctggtatatgataaagacaatttggataaatttttagaatttgcccgggaatttttacatactctgcaaatcctccatctgtaccgcatccaaggcaggttcggtgtgcacagtttacataatctcctctggagcaggcaggacaagtaccgcaggcgcttcctgtattttcagatactacccgatcgccaactttccagcggggattgacacgctcccccatggcagcaatggtccctacaaattcgtgacccattatgtaaggaacaggtccctggggagccaaatttccatagaaaacatgtagatcacttccacagatcccgcaggcagttacctttaataaaatatcctcgtcatctatttggggtacagcaacttcccgcagctctgtcttgcccctgtcatataacaccatggctttcatttaaatccctcctcacattcctttatggttaaagatattttaagtatatctttcatggactggaatagctacatacccatgtatggaaataaatgtctcagattcgaccgggagattaaattcgttcctttttgtacgggttttccagggaagattctactaaatccattaaaagaaaggagtaatagaaggaaaatacttcctgaaaatcttcgaattcaatatcgtataattcttttatctgacggatccggtaggcaactgtactcttgtgaagaaaaagcttttcagatgtctgggataaggatttattggaaagcacatattcccttaatgtctgatataggctcctgctgttgggggagtcgctgaaccgcatctgcagaagcttggtattacaaaattggtacagatattctggatgttcgggagggcaggaagaaaaggccatatcaaaaaatttgtaatcattgcactctaccagagacgacgttacttttagtttctgaataatctttcggattcgttctgtctgtctgtaataaagattcatatcattaatatctgtgaagtggtcacttaaaattccaagaatctgattcttttccaattgttgaataaggtaacttttcttttctaaaaacatgctttcatctttttccagattcagcagaagtataacattgcggcggtaataaaagcaaatggaatgaataaaaaggtttcggaacagctcaattaggtagccgtccttattacggttgtattgatatttgcctaaggtaaaatttaccaactgaatttttttatagggaaattcatcaggagaaaaagcaggttcttcatgattggtatccagcatgtcccccagcaaagagatgaggtaattatttttggtcatgtgttgaatggaagttgcaaggctgtttacctggataaagtgggcgacaatattgctgaggcattgaaacatacttacatcaatatcctttacccgttcgaaaggaacatcataggtatgcagaagccccagatagttctctccagagtagatttttgacataatacgccatttgtctgtggagggataatgaacaaaataaggagtatttgtattaaaatctttgccataattgtgctgcatgtcatagcaatgctgctctacagagaattcatgtgtttgaaaaatagagttccacaaggaatcatctgaagttccagtaactgtcctggatatggcgagaattttccttccgccgggagaacctacgattagaggaacatgaaagtaggaggcggaaatatcgataacttttgataaattttgtagcataagaagctgattgaaaaagtttttgcttgtttccagagtgttggcttctatctgaagataagagagcagctctgtgacacatgctgaaagggaggtctgagagggaagctcaaaggcaacactgcttgaggtgaaggttgggggataggtatattcgcaatcttgaactaatagaaggagaagtttgggaaatttttccagatactgggagcggattacctgggaaagagaaccaaaatataggatgttgggttgtatgtaggtttcctgtgccaaggactgaatatttgaaatggttgtattagaaacctgcccgatctgccgaatacaatacttttgaataatggttaaacagggttcaattttcataatgattcctccttaaaatagtgtatggcaatcttctgtaaacataaggagatttacactttatttattaaaagagaaagaacggagtacttttatattaccatgacaggtttgcttattcaatggaaaatgactgagaaatatggaataaattagaaatgatgccgcaatattgtcaaaaaaaagacaaatacgacttggagtgcaaaaattgtctaatatttccctctggtaaaacgtatcaaaagaaaattgtcaatgatactatgaaaacatgaataaaagagagaacggatgaaagcaatttaaagagaagagggaaaagatgggaaaatttgtactcagtgttgacaggggaacaacccagataaaagtgtgtctgattgatgaagagggacgtattgtagatcttatatccacaccttctccaccaggccattctcctgagacgggatggtatgaacaggatatgaatgaaatttatcatgtaactgcgggagcaattcgggcattgttgagcagaggatatgactgtggacagattgaagcagtgggaatcacaggacagggaaacggaatttttttattggataggacagggattccggtgcgtccggcaattatgccgattgatctaagatgccaactgttatccagtaaacttgaagaaaatggcacggcagaacatatacgaaatataaatttttttggtcttccctcctgcagtccattggcatttttgctttggctaaaggaaaatgagccagaagcttacgggcggattcgatgggtgatttcttgtaaagactggattcgattccgaatgacaggggccattggaacagataaaacagatgcgtctggcgcaggtcttatggacctaaaaaccggtaattatagtcaggatatttttgagatcgcaggagtaaaagaggtaatccactggctgccggaaattcatgaatcttatgagatagcaggatatatcaataaaagctcagcagaggaaacaggattaagggagggaacccccgttgtatatggagcccatgatattgcagcctgttcacttggggcagggggacaaaaggcaggagacatgacattgacagcaggaacctttggcattagtttgggagtgctggaacagccaatgggtgtgagtccatacagtactactctgtgtcatattctgccggagaagtggatttcccaccactccataagatccttttcctatagcttaaaatggtttttagaattgctgtgtgacagagaacagaggattgctgatgaaagaaaatgtagcttgtatcaggttctggatgaggttttagaatcaagaaaacctgtggatattttggtaagaccctatttatacggcagtatgagcggtgaagatacaggaagtattctgggacttagaagctggcataattccatagatattctgttggcggtttatcagggatttgcctacgcctatgtggaggaaatcaggagataccaaagtgtaatcggatgtgagaggctgtctttgtgtggaggaggagctaagagtaaaaccttaggaaaaattcttgcagatgcatcgggacttccggtttatgtgtccgcaatccaggaggaaacctgtaaaggagcaggactttgtgcatggttgggagttgattatagaatgggaataaagctggtgaacaatgcagcagctaatgattttgtgtggaaaccaaatatagatgcatatagccagcatgagaaaaatctcaggcatttgcttgacataaacagaaaattatgggggaaagaaggatgaaaaaaaggttattactggtgtcagactgtgtggtatcacctgagatgtatcgggcgtatttttccattgcatgggatgcttatgaagcagagattattgaggatttgaagggatatacggatatagagttccaaaagctcatgcttggaacagagcaaaggggaccagaggcctatgaggaaaataaggaacttttggaaaaaattcctgaggcagagattcttattgtacatatgtccatcattaataagaaaattttggatgcggcaaagaagttaaagctgatttttatctgcaggggaggctgtgacaatgtaaatatgaagtacgccagggagaagggaatcacagtagtaaatgcagcttcccgaagtgcggatgcagtagcagattttacagtgggtatgatgatcgctgaaatgaagaatatgatacggtcggccattaccctccatgagggaaagtggatcaaagaatatataaattttggccatcatcataacctgaaaaaccaagtgatcgggattatcggatttggagaaataggtgtgagagtgtccaataggctgaaggcttttggctgcagaattattgttcatgatccttatttatcaaatgaaaagatcatagaaaagggaggcgatccagcagatctccaacagcttttaggggaagcggatgttgttaccattcatcttaggctttcagaatctacgaaacattatttgggtgagaaggaatttaggaagatgaaaagtacggcatattttataaataatgcccggtcaggattggtagaccaggaagccatgataaaggctctgaaggagcattggattatgggagccgcactggatgtatatgatgtggagcctttgccggataacaatcccttaaggcaattgaacaatgtcacgctcacccctcatatggctggggtaagctgtgatacggtgacaaacggggtggaactgatagcagaggaactgaaagcatatacacagggaaaacccctaaaaagtattgtagtataaagcacatggaaaaggaaagaggggattgctatgttagtcacaatgaaggaaattctcattcatgcaaatcacggaggatatgcagttgcggcgccaaatgtatgtagtgaactggatgcaagaggcgctttggaggcagcggaggagctgagggctcccataattttagatgtggcatacaatgccactgtggatctggtgtttttcggaagatatctgcgggaattgtgtatgcagtcatcaattccagcggcgattaacctggaccatggggcgcagtatgctcacgggatggaagctattcgggccgggtttacatccatcatggtagaccgttcagttctttcctacgaagaaaatgtaagacaggtacgagaacttgtcaaggctgcacatagtgtaggtgttacggtagaggcagagctagggcatgtaggtcagggagaagcatatgacagagacagaaatgccggacttacagatcctgagatggcacaagcgtttatccaggagacaggaattgactgcttggccgtggccgtggggacagctcatggagcttacaaaggtacaccatatttagattttgagcttttgaagagaatcagagaaaatgtgggaaacgactttccattagtacttcatggatcatccggaacaggtgatgaggcgctgagaaaggtatgtactatgggaatcaataaggtaaatgtagcctatgatctcatgaaggcagccaatgatgcattggtgtcagccaatttacagggaaatgatatttacagcatttgggatgttctgaaaaaaggatatcggatgaaattaatgcagcaaatggaactgtttggaagtgtgggaaaggcctgggaagtgaaacctgcaggtatgcccagggcagatatcactatggaagaaaaataggagggttgtttatgcaggcgtttgatttttgcagacctacaagcataattttcggagcgggaagggtctcagagattggaaaaatcgtacgaaaatttggaaagagggcgttattccttacctatgacaagaacacctgccaaatgctggggttgtcaaagaaagtactggaacccctgaaagaggctgaagtagaggtattggaagcctacggagttaaatccaacccaacggtggaacataccagagaggtgttgaaagaagcaagaacctttgggccggatatgatcattgcagttggcggcggaagtgtaattgatgagtgcaaattattatccgcagcattaaattatcagggtgatccctgggatttagcctgcggcaaagcagagattaataaggtggttcctgtgattgctgtagttactatgccggccacaagctctgaaatgaatgatacggcagtaattacgaatgaagctttacagcgaaaggaaggcttttcccacgtgaaaatggttccggcagcagctctcctggatccggaactgacctatgatatccctttaaagcagacaggatactctgccacagatattgtttcacatttgctggaggcttatattgcacatgaagaagcttttgttcctatgcagaataggtattgtgagggaatgataaaaaccattatggactgtatggatcggattctggaaaatccccatgatccggaagccagagcaatgtttatgtggacagctacttatgcatggaacggcttctatgtatgcggtctaggaccgggaaatccggcaatacatattcttggacactccataagtgctttttacgatactccacatggggctgcaatgggcatcacaattccagctgtaatcagatatacattagaagagcgcagcaggcggtatgcaaggatggcacggcagattttcggagtggatgaggatgacgatctccgggccgctaaaaaagggttggagatgctggtccagtggattaaaaagacagggtcaccaaccacgtttaaagaggcgggaatccctgaaaacgaactggatgagctggcagcagatgcattaaagactgccgctgcctggggtgtaggaagcaaatataccctgaagatgtgcagagaaatgttcgaatattgtctgtaggaaaggaaggaaaatgtatcaggcagtgataatagcagatgatttttccagtgcagcagactgcggtgttcaatttgccaggtatggtgtggtaacaaaggcgatggtggatatgaacagttcctgtttacccaaggcgcaggttctttctgtagatacagacagccgggcagtgagttcgcgggaagcctatttcaggaataaaaaagccgcagagaatgtaaaaaaatgtgggtttcacagaatctataagtccattgattccacattaagaggaaatataggtgcagagattgaggggattctggatgggctgggatggtcgtttgctttagtaacgccggcttttccacaatatggaagagtgcttgtaaatggaattcactatctgaatggtattccgcttgcagaaagctttctacaaaaggatccagtatgtccaatgagggaatcctcttttctaaaaatcctacagtctcagttaagaggaaaggtagctagtatcggcctgagtaccgtacggacagggcgggaatgtttcctggaggagatagaaaagctttgtcaaatgggagtgacggtggcggctgtagacacacagacagaagaagacttaaggctgacagctgaatatagtttatatttaaaagattgtctggtgtgtggttccaccggcttggctagatatcttccccggtcatggggattgacggatgatttaaagaaaaatgaaggaaaaacacaggaaggtcctgtaattgtagcagcggcaagcacatctccggtgaccagaagacagatacagatattggaagatacaaattgctgcacagtagtaaaaatcccccctctggaactagcagaaaagcggtgggataagtattttgaagcagcgcttggaatcttgaaagaaagcagaaatcttgttatctgtctggaaggtcaggagaaggaagcagccggtaccctgggtgtggtttcactttcagtaaagattacacaagaacttggtattttagtgaggcagcttttagaccaggcaggggcagcgggtattgttatgacaggaggagacacggcgagaggcatatgcagttcccttaagggaacagtgatggagctggaaggagaaatagaatccggaattcccaagggcagactggatggcagctataaaataccaatcgtcaccaaggcgggggcatttggaacagaaaatgctcttgtacttgcagtaaaggagttgggaggtgcgggaaagtggaaaaagtaaaaagacctcttgtagccattacaatgggggatggggctggtataggcccggagattatcataaaggctttggatagcggtgagatttatgagaactgtaggcctttggtaattggagacgtaggaattctaaaaagggcgattcatgtgacgaacagcaggctcaggttgaatatttgtagtcagccggaggaagggatttataagcatggggaaattgactgtttgtccatgaatctgttgccggaagatcttccctttggacaggtaagcgccgcggcaggtgatgccgcataccggtttattcaaaaagccgtaacgcttatacaggatggtcaggcggacgttctgtgtaccgcaccgttaaataaagaggcgctgcatctaggaggtcatgattttccgggacatacggaaatattggcagacttaactgggacacgaaattattctatgatgttcgcctctccggaattgaacgtcatattagtgacaattcatgacgggcttgtggacgctattaataaaatacagcctgaaaaggtatatgagacaatctgtatggccaggaaggtaatgaagaaaagactgggcagagagcctaaaatcggtgtatgtggaattaatcctcacgcaggggaaaatggtctgtttggaaatagggaagaagagcaaaaaattcttccggctgtggaaaaggcaaatctggagcatatacaggcagagggaccccttccggcagatacggcgttttatctggcgaggaaaggaacttatgacattgtggtatccatgtatcatgaccagggattaggcccggttaaggttctgggaattgagaacagcgtaaatgtcactgttggcctgccttttatcaggaccagtgtggaccacggaactgcgtttaatattgccggaagaaatctggctgacgaacgaaatatgaaggaggccattcaccaggcatggctgctgtgtggagaaatgagttgaatagggtgatgaggatagacaaaaggtttgtaagaaagcagatcgaagaattgggatgtattggaagggatgcgaagggatgtctgtgcaggcttgcttattcctcttccttttgggatggagttcattggctggagcagttgatgacagaggcgggacttgagacaaaggtagacggcgtgggtaatgtgatagggacttggccgggtcaggagggctatggggagattatacttggctctcacatagatacagtattggatgcagggatatttgacggagccactggaattataggagccatagaggctgtgacaacaatcaaaaaaaacgaaatacaccccaggcataccatcagaatcgtggcatttgctgaggaagagggcctggtgatcagcggattatttggaagcagagcttataccggaagaattgatatggaatcactggatgctcagattgcttctgaaataggaatagaaccctggaaaatccaggaggcggcagtgaatattaataacatatgcggctatctggaacttcatattgaacaggggggagtccttgaaaaaataggtaaggatatcggaattgtcacggccattgtaggatacgaaagattccagatcacggtaaagggaagggaaaaccacgcagggacaactcctatggaattgcgggatgatgcacttgtgaaggcttcccgcctccttttggatctccagaaaaaggcaggggagattgacaaagatatggtatgtaccattggggtgatggaggtatatccaggggcatgtaatacagttccagggagggttttattaaaagtagacatgagagctgtgaaagaggaatccattcggaaattgagggaatacatgtattcctactattccagggaggagatggagattctgcaggagttgtctgaaccgccggcttttatggaaaaagagatccaggacaagattgaatcagcatgtagaaaacagggatacacctatcactatatggcaagcggagcagcccatgatacaacagccatgtccctggttacccgctgcggaatgatttttgtacccagcatcggaggaatcagccatagcccgaaggagtgcagcgcttatgaagatattgaaaaaggcacccaggtattaatggatactgtgctgcttttggacgattcatgggactagggaagaggaggtgaaggagaatacaagttggcagtttagaagggaggtaagaaaggatgaaaacactaattaaaaatggctgcatcgttacagcatccggtgaatttataggagatatcctgataaacggagaaatgatcgcagcaatcggaagaaacttatcagaggcagcagacaagataattgacgcatcaggaatgtatgtattgccaggaggggtggatcagcacactcactatgccggattaaatacggatggggtaaccctaagtgctggctatgaaacttcctatggagctttgatcggaggaaccacgacattagtggagtttgctgcaaatgaaccgggaatgggaattcttgagacgctggaatatcggaaaaatgtccgggctaagggaaaggtatcgccagattttgccatgcatgctctatgcacggatatacgtcctgatctgtgtaatgaaatcgaacagcttccggagaaaggagtgagcacactgaagctgttcatggcctataagccaacagcactttataccgatgatggagtattgtttaaggctatgagggcagcggcaaaggttggagtaactatgtatgtccatgcggagaatgctgacttattgaatcttctaagggatgaggaatatgaaaaaggacacagggaacccaaatatcattacctgaccagacctccttttgtggaagcagaggctgtaaggcgggcgatcacactttctaaggaagcaggctgtcccttatgtgtggttcatgttacctgtaaagatgcagcagaggtaatcagggaggaacggattaagggggctccggtagtgggagaaacctgcacccattatttgattttggaccaaagtaagatggatgatccggactttttgatcgccagtagatatgtgtgttctccggccttgaggacacaggaacacagggattatctgtgggcggcactggcaaagagggatttggatattgttgcgtctgatcactctggcattcctcttacgcagaaaatatgggggaaggatgactttcggaaaatacccaacggctgcccgggaaccggtgacaggcttcagatgctttggacatacggagtggaaacgggaagaataagccggcagcggctggtagagatctttgcagaaaatcctgccaaaatgaatgggatttatccaagaaagggtactcttcaggtgggaagtgacgcagatattgtactgtatgatccgaattaccgcggtgtctgcactgtagagacgaaccccagcggagtggaatataatttatttgaaggagtagagcagattgggcgggcacaaacagttctgctgaggggaactgttgtggtgcaggataatgtttttgtgggagaaccaggctggggtaggtttattcctgggaaaccatatggcatggcttatgatttattaaaataaagaagaggagaaggtctatgaaaaaaagaatgaaagttttagcagcagctatggcaatgtgtctgcttgcaggagggaatacagttttagcagcagaaggagaagcttttgacgattatacaagacccaggattgtcacagacagggctcttaaggtggctcatatggtagaggtactggatacaggtgccgcagagcgcacagccaatcagatggagattgaagcagcccacagaggctgggatctgtacataaataattatggaacagccacacagtttgcagatgcgttcagaaaaatgatcgcagatgattatgatgtgatcgtgcttcattctgtcaattccatagcttctaataaagaattaattgaggaagcacgggaggcaggaatcggtgtttactgcaatgatacacaggtagttcctggctgcatcggggcatcggctatgcctaatggagttgccgcaatggaaatgttttatcaggttgcaagagattaccaatataacctgaaaaatgcaattatatatcaggcaggtgcccagttaaatatggaaaggacatatcccatcaaggcgttgagtgatggtgtggtctaccccaatattgagaatattgtatgggaggatgtttctccctttaatgccacctatcagcagacggtttatgaatggacccagacctggctgactcaatatggagaggaactggattggatcatgaccggctgggatgcctgcggagagtcttgtgcagaggcaattatacaaagtggtgacgctcatggggagaagacatttgtgacaggtatggatggagatgcgctggcttacaattatattcgaaataacacaccttacaaatatacatattcccagccctttgagctgtatacccataatatctgcgagctcattgatcaggttcagatacagggactgaatccaggagatgagggatgctccatcagctatgtaggagagactatttatgcgacaggaatcgttacaggtccttccaattgcccggaagtgggagcgaatattcattctatttttgattattatgggggaaatcctgacgataaggatgcctggtataattggacagatggccctggtatctacaccctaggcgaagcggaatagctttttctgcatacaggcatgctccgacgataggcggacatgcctgtatgcatatatccgcacaggcaaagaaagccatcagcagcatagaggcagataaagtgtgtatgagctcggaaaggaaggaacattgaagaaaccgtcttatataaaaataacagatctgacaaagattttctcaaatgtaccggccaataacaaaatcagtctggagatttcccagagagaaattttaactattatcggtgaaaatggggctggaaaaagtaccttttgtaaaatgctcacaggtgtttatcagcctgacggaggaaccattgagattgatggtaaggaaatgcatttccccaatgccatggaatcatccaaagcaggaatcagtatggtataccaggaaagaaatttaatcgggcatttgacaggtgcacagaatgtttgtttagggctggagcccaaaagaggtcttcttatatcagaaaaagaagtgatgaagagggcgttggaggtaagggataagttaggattatccgttcctttggatacgccggtggaaaatctgggggcaggagagcagcagcttatagagattatgcgtgcattttacacccatcccaaactcttgattttagatgaacctacgtcctctcttggagaaaatgaaattggaccatttttaagctttataaaagaaatgaaaaaccggatcgatatttctgtgatatttatttcccataagattgaagaggtttttgagatcgcggataaaattgcagtttttacggatggatactgtactctgcaaaagagaatccaggatacaagccaggaagaatgtatagcagctatgctgcgcagtgacaaggtaaaacctatacacataccagacaaaaactttgaggacgctgagcctgtcttgaaagtagatttggaggaggctgattatgacaataaaaagcatcgccttcatttctgtattcacaaaggagagatggcaggcatctatggcttggttggcgctgggagaacagagtttgcagaggttttatttggactgcggcaggcagaaatgttttcttttgagtttgacgggaaaataatatcagaaagacatggggcggcaaagatgctggaggaagggatgattctgattcctgaaaaaagaatcaatggaatttttccatccatgtccattacagaaaatatcagcaatttatttttaaaaaagcggctttccaacagggcaggagtggtgaatttcagaaagtgcagagaattcagtacagagatttgcgaaaaaaatcttgtgaaataccatgacacagagcaggccatatcagaattgagcggaggaaatatccaaaaaattataatcggcagatctattgaaatagataacattcgtttactaattcttgatgaacctactactggaatggatattggggcaaaacatgaggtataccagcatttaagagaattaatagaagaaactggcatctccatcatttttatatcttctgagctggatgagattatggctgtgtgcgataaaatttatgtatttgcaaatggaaatacagttgctgaatatccaagaaaacaattctcaaaaccctatattatggaaagcgctgtcagggagtgacacatatgaagaaaacaaaagagtacaagggggccgcaggcttcattacaaaagaaatacctaaatattttttgttaatagcgctatttttactgatcctgttttttacttgtttaacaccatcctttttgaggctggcgaatctaatggatatattaagaacagccagtgccttcgggcttttggctatggcgtttaccatggttcaggccacaggtgacatgaatttcactttttcagcccaggctgcaatgggggctattttaacaggtatctttatgctgtatctgccttattggataagtgttctgctggctgtgattatctgcacgctcagtggactgctgccggcatttttcgtaatacatctgagggtgcccgcattcataaccacaatgggatttatgaccatttacactggggttttgaagatcctgacaaacaatacaatcttgtataagaacgaatggggagataaatatacagcactggccaggggtgaatttttaggaattccctatccggttatcatattcttggttttggctgtggctgttcatctgttctttgagagaagcaggactggcagatatttatttgccatcggtgcaagtaagactacctgcaggcaggtggggattaacgaagctaaaattcgttatataggctaccttctatgttccgcactggcagcattgggagggattgtatatggctcctcactggggcaggcaagcccccttctgggaaatgatcttacactcccggccattgccatcaccatgctgtgtgccaccttttataagcccgggctttataatgtgccaggaattgtggttgcggccattattatcattgtggtccaaaatggagttatgggtttgggaatggaggcatgggttaaggatgtggcggtgggagcaatgctgatcctggcagtgagttttatagccagaacccacaagaaggggctgcccacggttacctttggcaactagggacaggaaaggagtttttcgatgacagatacaaaaaacaaaaaggagccagtgaaaaaaagctttatttttacaaacctttctaaattctggctgttgtattttaccatacttcttgccattgtttttgggattttaaaacctgcattttttattcctaccaatatgctgaatatcctcagttccgcatgtctgacagggttagcgggtctgggtattacctgcatcagtgccgcaggagaaattgatttttccattggagcacaagtgacatttagtgcggctatgatgggagttgttttaaaacaaccattttttcagggacattatgtactggtgctggtgcttacacttatggcaatggtttcgtttggactatttaattcttttctgcataatcgtatgggaattccagcctttattgcaactatgggatcttcttatgtgcttcagggaattgccaaaaggatgctggaaatgaagactttaagggcagatcctacatggccgtcctgctatacttttttaggccagacctacattgcaggagtattgccgatctctctggtaattctaattgttgtaggaacggcaatgtttttctatacagaaaagacatgttctggacgctatatgtttgcagtgggagcaaattcctcggcgtgcagatatttgggaattgactctaaaatacagaagagaaagggatttatcttgtgtgcagttttgggtggaatcaccggtattttaatgggatccatgcaaaatggggcgtcaataacattgggagatgacatgctgttccaatctttgactgcccttatgctgggggctacttttctaaaaaggggtgtgtacaacgtagccggaacactgctaggggcagtgctcatcgccattatttcttacggtgttaccatgttgggagcacctccctatgtaagagattttacaaagggcggtatcttggtattttcagttacattagtggctgttcttcgtagcagaacagcaaaatctgtaagttgacaaaggagaaggaaatggaattaattattatgcttacaaatcacgatcagacagtatcaaatgcagttcagttatttgaggaatgtatagaattgccagtacagcattggggatttaaaaacattggcttgccagttccacagatgaaggaattggtgcggaaaatgaaggaggctggaaagaccacctatttagaggttgttacatatacggaaaaagaatgtctggaggcggctaagctggccatagactgtcagtttgactatcttatgggaaccttatactttccttcggtgggagcgcttgtgaaaggaaaaattaagtactttccgttctgtggaagggtatgggacaatccttctaagctgggaggaactattgaggagattattggagatgccaagcggcttgaaagactcggctgtgatggaacagatattctggcttaccggcatgtggaggatcccaatgggcttttgaaagaatatttcaaggaggtagagtttcctacagtagtggcgggaagtattgacagtatggaaagaattgattacatgaaccggttaaagccgtttggaataactatggggagtgctttgttcgcaggcaaatttgttgatgggggaagcttttttgataacctgaaagtagtgtcagagtatgttgaaaggatagcaaaatgaaagattgtaacagaattaccatactgatcgcagggccgagaaaaggggggaattcacatattctatgtgaatcctttgaaaagggagcagttgaaggtggatgtaccgtagagaaaatttttacttcagaattggatatttcctactgtaagggatgtgaatattgcagggaacatgaaaatttatgctgtcaaaaggatgatatggaggttcttttacaaagtgtaagaaatgcagatattgtggtatttggaactcctgtttatttctataatttaagtgcgcagttaaagactattttagacagaatgtactgtatttatcgaaaacctccatttaaaaaggcagtgctgctggcagcggcagcttctcaaaaggctctgtccgctatgcgggttcaggaagcatttgatggatttttaaggtgtcttccaggcgtggagatggcaggatgtattgttgctcaaggggtagaggaaaagggggacatacgccagacagattatcttctggaagcttatgggttgggaaaaagcatgggagaatggaaataaaaaattttaaaccaagatatttttaaaccatatggagaaaaagaagaaaatgtcgcgaaacaacatattattagttgctttgcggcatttttggcggttacgagacgaaattctatcaccccaatctgtacagaaaaaaataaaaaaagactctggacaaatgacagctgagaggctataataaaatccaccagataacaaacttcttttttcaacgtcgattcagacgattatttccaatgatacagaagataagaatataaaatataggatagacagcagggtctgctgtttgggaaagtgctgtctttgtaaccggttgaccgtagaaagtgaggtggcggtttggggtaggtggcatgctggctgtcagtgcagctcttggagcggcagggatggatctgcgccagggcagagtggacaatgggtggattgtgctgttctggatctggggatttttgtatcagctttctcatagagggctgaggggaatcctggatttcggagcaggtgtgcttcttcccataggtgcgctgtggctggtattttatttccggatgctgggggccggtgatattaagctgttgtctgctttggggggaattatgggacccaaagcagcagtaaaatgtatggctggctccttttttctgggagctgtattatcgattatgattttgatcatctgtggaaatcttaaagaacgtctattgtatttcattgaatttttcagagagtatcccatgacaaaacagaaaaagccttatcgaagagaaggaagacgtatggagaacttccattttaccatccccatactgctgagtacttttatctatgcaggaggtttttattgaaaaagaatatttttgcagtgtgcgatctggaggtggattatgcccataattttatggactatctgaatcaaaagaggaatattccctttgagatccaggcttttaccagtgtggagcagcttatgaaattcggcgtggacagacatattgagatcctgttgatctctgataaagctatgggtccaagggtgaaggagctggatgtggggaagctgatgatcctttcagaaggggtgcatcccccagagctggaccagtatcccagtgtgtacaaatatcagtcttcggaccatgtgatccgggaggtgatggcttattacggagcggataaggaggtggcagttcaggagccggtggccaagaagcccatggagatcctgggagtatattctcctttgggaaggactctgaagacctcttttgcactggcattgggccagatcctggccagggaccgggtggtcctgtacttaaatctggaggagtatgcaggttttgaagagctgtttgagaaggagtatgagcataatctaagtgatgtgctctattatgtgcggcaggagcacgtgaaccttacccacaagatcagcggggtaatggactctgtccaaaatctggattacattccccccgtgcggtcccctggggatatactcactgccacagcacaggagtggaaccggctggtggataccattgtcctgaacagtgcctatgaggtattgatcctggatctgggagacggcgtggacggacttttttccctgctggacaggtgcagccgcatttttgtcccggtgctttcggatgttatgtccagagccaaggtggagcagtttgaaaagcttctgcgcatgtgggactatccggaggttttgagaaaaatggagaagctgaagcttcccttccatgccgggctgggggacgggaaaacctatgtggagcagttggtgtggagtgagctgggagattttgtaagaggtcttctgagaaaggaaaacccatgagtggagaagtattccgtaaaatgcgggggttgttaatggaaaggctggatacctccaaagagctcaccgacagggagatcctggatattattgatgagctgatcttgggggagccggggaacagctatttgtctttaaaggaaaaggtgcagctgcgccaggagctgttctattctgtgcggaagctggatgtacttcaggaactcattgaagatgatcaggtcacggagattatggtaaatggtcctgatgcgatttttatcgaacggggagggaagctgaagcgttatacgaaaacctttacttccagggataagctggaggatgtgatccagcagatcgtgggaaaatgcaaccgggtggtgaatgaatccatgcctattgtggatgctagactggcggatggtgccagggtctgtgcggtggtggctccggtggccctgaacggaccgattctggatattcggcgttttccggaaaaacccattaccatggaacggctggtggagctggggagtttaaccagagaatgtgcagattttctgaaaagattggtgcagtctcgttattccataattatcggcggcggcaccggctgcggaaagacgacgtttctgggggcattgtctgattatattccaaaggatgagcggatcattaccattgaagataacgcagagctgaagcttcacggcatcgacaatctggttcgcctggaagccaaggcggccaatatggaaggggcggttgagatcaccataagggatctgatcaagtcagcactccggctccggccggaccggatcgtggttggagaggtccggggctcagaggcgctggatatgctgcaggctttaaacacaggacatgaaggaagtctcagcaccgctcatgcaaatagtcccaaggatatgctcagccgtttggaaaccatgactttaatgggggtggaccttcccttggaggccatacgcaggcagatcgcatccggggtggatatcttgattcatctgggccgtcttcctgataagagcaggagagttctggaaatctgtgaggtgctgggatacgaaggaggggaggtgaggctgaacaggctttatcagtggctggaaggaaaagggctggttacccagggggaactcctgggcagggacaagctggaaagggcgggaataaggttatgaaaaaggaatatgggacttatgagttctcaaagaaagaggttttgaaatatctgggagaaagtgtcatgctgggaggacttgtgaactacctgttttatcaggcctggtgggcctggctgggggtggtgcccctcacagtgatctattttaggtggaagaaaaggaggctgatcttggagcagaaaaagcagctgaactatcaatttaaggatgcacttgcctctctcagcgttgccctgcaggcaggttattccgtggagaatgcagtaaaggcctgcaggaaagacatggagcagctctatgacagaaagaccgatattgtccgggagcttttatatatggaaagtcagatcgcggtgagtgttcctgttgaggagctgtttctagacctgggaaagcgcagcgctctggaggatatcgaaaactttgcagctgtatttcaggcagctaagcgcaccggcggagatatggagaagatcgtgcgcagaacggccaggatgctgggagataaaattgatgtaaaaaaggagattgaggctacactctcagctaaaaagtcagaacagatgatcatgagcctgatgccatttggcattatactctatatgcagctgacatctccgggatttctgtcggttttatatggaaatgtctttggggcagcggccatgaccggctgtctggggatttattttctggcgtattggatggggcagcgcattgtggatatcgaagtgtgattgtggatgacagcagacgaaaggagagaaacatgtggattcatctggtgatttttgcgggacttctcctgttttgtgtgggagtccgcctgaataaaatacgttttccggcactgatggaggagaagaaccgaaagctgtttctggcagtggcctttgcaggaaattttttgggaacggctcttacctggcagagcggaagtgcagtccctctgggagaggaaggttatctggtaaaggaggagaccggcggctatgaggaagctcttcaggtggagattgagggagaagagccctctggcttccgggtgcaggtgcctggcaaggtaaatccaaacggggagcaggaagtggaggagatccttccaagcagggaggataccttaaggcggcagctcacagaagaaattgagtatctaaatgaagaaagggcagatccagataaatattatcttccggataagctgggagataaaagaattctctggagaaggcctggggatacgtcaggggctcttcttgcagccctgtgtctggtggcggcagccgccttagctgtggcaaagcaaaaggagatgctgcaggaaggggaaaagaggcgggagcagatgtttcaggattatcccaatcttgtgatgaaacttaccttgctggtacaggcggggatgacggtgcgcttggcgtttcggaaaatatcccaggattataaacggacaagagtgcagggcagcccccggtatgcctatgaggagattgtcactgcctgttatgaaatggacagcggaatctcggagtccgaggcctatgaacgattcggagagcgttgtggacaagtgaagttcaagacccttgccaccttgctggtgcagaatcttcaaaagggcagccagaggctgctggaaatgttggaacgggagtctgcagaggcatttgaggacagaaagagaaaggcaagggttttgggagaagcagcagccaccaagcttttggtacctatgatacttatgcttctggtggtgcttgcgattattatgataccggcgatgttatctttttatgggtaggaggtggaagtttgagagagcttatggaattttggcaggaagaggaagcagtaggagttgtggagattattttaattcttgtggtgctcattggtcttgttattatctttaaggaccagcttaccagtcttgtgaaaaatattttgtctaaaataactcagcagagcaattccatttagaccggcctcatccatatggaaaagtccctgctggaagcatagagggctgtctgccagaaacaaaaggcggggacttttctgcaggaaggaaaatagggtatgaagctgcgaggcagttggaaggaggcatggatatggaaaggaataaggggagcattaccatctttatggcgttgattctttccctgatggtggcccttgtgtgctccagcctggaatctgttcgtatggcggcagccagaacccagattctgtgtgggatggatgtgggattgtactccctgtttgccgggtacgacaaggaacttttagataagtatgatttgttttttctggacgcaggatatggaagcagttctttaaagccgggaaagatgtgtgacacgtttcgtgactatatggagccggtgttaaaagaaaattatcagaagctggtgtggagaacaggagggcttacagcctacgcattggcaacagacaacggtggaggcttattctatgaccaggccgtggagcatatgaagaaaactttaggagtggcaggagtacagctgcttatggacaaaacggcgagagagagtgagagaagccagcaggcggctgaactgtgggagagtgcaggggaaaatcagtctctgagcaattatgacaatgagatgactcaggcagctcagaaaagtcatgaggccggcaaaaaagagcaggaagccaatggcgagataccggacgaaagtgggggaacccagggatttcaggatgacagtgtgggtctgggggtagatcccaaggtggaaaatcctataccggtgatacgaagagtccagagaatgggacttttgggactagtccttccccaagggcaggaggtttcggataagcgtttggacacagctcagacagtttcccacaggcgtcttcaggagggcatgggagggattgaaactgccggcagccagggatttggcgatcaagtacttttccaggagtatattatgaagaaatgtgggaatttcagaaacccagcctccaatggactagcctatgagacggaatatattctttatggaaaatccagtgacgttgaaaacttaaaggcagccgccagccagcttctgcttatccgggaagggatcaatcttggatatctgctgatggacggcgagaagatggcccaggcccaagctctggcccttgggatctgctccgcctttcttatccctccggcagccgggatcgtgaagatggttctggtgctgtgctggtcctttgcggagagcatcctggatgtaaagaatctgtttcagggagataaggttccggtaataaaaaatgccgggaactggcagctgtccctttccaatctggccagcttcctggagcgaagtgacattgataaaaagacagatgaaggcggcctggattacgaaggatatctcagggtgctgctgttgatggaacaggcccgtaccatgtgtctgcggtgcatggacgtgatagaaaatcaggtgcgcagcaggggaagaacttctttttccatggattgctgtgtgggtgctgctgaaatggctgtggatgtggaggccaatcacaggaaaacgtatactgtcaccagagaatattcctatgtgtaaaggaggtgtgcacggatgtctttccggatcaaagatagattctgtgcagatgtgcagaagaagatcatccccccaattataaaaaatcaaaaacgctctcttcaggtaggttcattcctgtcaaccccgatggacaggaaacaaaaagccggaaaggcatctgtgcatgcctccttgggagtatggaagagagccggactcactgtggaggcctcctttgtgctgcctttgttctttttggctgtgctgaccctggtgggatttatggacatttatcagcttcagacagagaagctggctggactgtgtgagcttaccaagactgcgtccatgtattcctatgtgcagggggaggaaaacaaggatatcacccttccgtctgtgtatacctatgaggcacctttttccccagtggctcttcctacactgcttatttataacaaggttaaggtgagagcctggactggaagcagctgggaagaaaatcaggaagaggacaacacgcaggacagcacagagacggtttatgtaaccgaaagtggaagtgtgtatcataaaaaagagtgctcttatttaaatctttcagcggaagctgtatcaggaatgggtgtggctggactgaggaaccaatacgggggaaaatattacccttgtgaacattgttcccagggacagcagccatcagggaccgtttacataacgaaaacgggagaccggtatcacaattcatctgcctgttcagggctgaaaaggaccgtacgtcttgtgaagctggaggaggttcaaggaaatctggctccctgctccagatgcagtgggcatggaggaggctgagtatgaaggaagtatggatattggcatttcttttttggaattcctggacagatttcaggagaagggaaatatcgctggccagcttggtgatctttctttgcggcggaggcttaagctatctcaccggagatttttcttggacgatcttccagcttttgggacttatcccagggggactgcttcttttatggggaatcctaacaaagggaaaaattggcctgggtgacgggctggtggtgtcggcactgggggtctttctctctgtggaggatgtgatctttctgttgacagcagcctttgcaggagcggcattttatgcaggaatacaatttatgaagaacagacgcagagggaatggaagctttccttttattccttttctgcttacaggatatgtgggaggtttgtggatatggttcagttaaaggaaataaaaaaaggaagctttacagtggaggcggcaggccttatgggggctgttttgctggtgatctttgctgtgctttatggaagtttttatgttcataaccgggcgtggcttactgctgctgcatacgaagcggctcttacaggaagtctggagggatctctggacagggacgcctatgccagtgcggacagcaggggcagacttctgggcagcactggcttttatggattgggagatttacaaatgaatacagctgtgggtggtaaggtgcaggtggaatatgagggaaatatggcctctgcctttgggggtctgacctcccgtcttcatgttcaggggagcgcaaaaatattcaggcctgtgtcctttatccgaaacgtacgtatggcccaggagctgggacaggccctgaagggggagtaggaaatgaaggtggattataaacgggatctaaatcataactatttgatccttcacggggaagaagcggtcaatacagcctcctatcaagtacgcatgctgctggcaaacgcaattccctgcctgcttccctgcaggctccagggaattgatggagaatcacttttctattatgatattacctcccgccagtctctcactgccctttatgaaaagcagaaactgaaggcagaggatctgcagcttatctttggtcaggtgatcagtgccctggagaatatggcagcatttcttatggatcccaatcagttggtgctggttcctgagtatctatatatggatgcggaaaagggaaatctgtatttttgctgtcttcctggatatgggaaagagatacatatgcagtttcgagatctgggagagtatttgctgcccaagattgaccatcaggatgagcatgcggtggttctggggtatggtgtttaccgaaaatccatggaggagcattttcaaatagatgaaataaaggaggaactgtacgcaggtacagaaaacagggaggctatgccctttgaggagaaagaggagtcctcaaggagggcagaagaaatacaggcagaggcgcgaaaagaagaaaaaccggatttgagcagagaaagagaggtcgtgccggagcagaataaatcggtatttgaatccttgggaatggataaaaaggagaaagaaaaagcagggcctatagggaaattacagctggctatagctgccggagggattcttttttttacggctgctgtcatagggattttatttatgaaaaaggccggatatcttccctggctggatgtgcccatgatgctgggagggctgctggtgtctgggggaacggctgttttttccgtgtctgtatggaaaaagaagcgaaagaaagaggctgagcctgtactgcctgtgagggaagaggggcaggaggataagtgggaggaggaatacctgtgggaaaaggagctggaaaaagaaaaggaaaaaccatatggacaaccaccaaagaatgcctctgccccaggagatcaaaaagtgcctggtaagaggaggcagagtacttggagtccaagggagcaaaggggagttcaggcacacggagaactttcagaagaattaggggaaacggtaattctatctcagagcaccggatcccgcagtccctctctggtgagcaaggaaccagggctcttggctaccatcaccctggaggaggagctgactataattggaaagctccccatggctgcagatgcagtcattcccatggacactgtcagcagaatccatgcaaaaattagaaaatatggggaggagtattatctcagtgatctgaattctagaaatggaacggctgtcaatgggaaaatgctgaagggagaggaggagtattgtctgtgtgaggaagatgaagtacattttggcggagctcaatatatttttttgaaataattgccaggtttgtgcctatggctggtgtccattataaattacttcatgtcagcctgtaaagggaataaagttgtcatttttgtttaaatatcttttgacttccaaagaataagtatctgcaggagagattttctatacatcatatagaaaatctggtacaatactggaaataaatggaacatgcaggtgtaaatctgttataatactatatacattaggtataggaatgaaaatcttatgcacactgagaaaggcgggcattacacatagaaggctgcccatactactggagacaacgctgacattgaaaggatataaggaatctatgaatggagagaaatcagagatagaagagagaaatacgaacatatggaaaaaagcaccctgtaatatggtgatcattgggttaaatgtccttgtgtttttgcttgtagaatttaccggttttagtgaggatactggacatatgctggattggggcgctgcctatgctccttatattgcccagggggaatattacaggctggtaacttctatgtttcttcattttggaatgtcccatctgctcaacaacatgcttgtactttttattattggagataatttagaggcagcagtggggaaagtaagatttttgcttatatatctattgggaggcctgggaggcaatgttttgtcctattgggcagaacaaagtcaggcaaatccacctgtgtcagcaggggcttccggagctgtttttgcagttgttggcgcgatgatttatgtgcttctgatcaataagggaaggctggaggacttgaccatacgccagatcctggtcatggcaggattttctttatactttggatttgcaagtcagggggtggacaatacagctcatataggaggactggtgagcggatttgttttggcattgatcttatatagaagaaaaaggaaagaacctgaggtgatagacctgtgattctttcctggttaagagctggggtatggaaggattaaggagaaggtacttccttttccgggaacactatctacagttatagtaccgttgtgggcctgaatgatttcctggacaatacaaagccccagtcctgtgccgttggtcttatgtgtcacgaagggctggaatagatccggcatgtattcaggagggattccgcagccattgtccttcactgataaaatcaggctgtttttctcacacagggcttcaaaatgaatcctgccgttcaggcctactgcatcctgtgcatttcgaagaagatttagcagagcctgccggattttggttttgtccaaaagtacatctggcagatttggctgtatctgaatttccagctgaattcccagatagtttatggaaggcctggcggaagccaggatcgacagcagataggaatttggatgtacggattccagatgaagctgggaggcgttgttataggcggatacttcattaagaagactctgcaggtactccatgttttctgtgagactgtcccactcctcgtaccggcttatggctggatgcatttgttccaaaagctgaagctggctgttgataagtgccgcacagttccggatttcatgtgttattcgggacaaaatggtatggaattgttggtttaaatctatgttattagattcctcatgcataagatcacctcattaggagtttagcattggccaggggaaatatcaatgaatatcgtcttgcaaaaatcgatgaaatgctacaaaataggggaaggaaatacaaccatatatggaagttcccaccgctgtgatccccagagcagttcccgtgcagctgttgataaattggaaccagttttgcagggcacagcaaggacgaaacaataaaaaggaggagaattatgtcagactgtatcttttgtaaaatcgcaaacggagagattcctgcagcaaccctgtatgaggatgaggccttcagggtgattttggatttgggacctgccagtaaggggcatgccttgatcttgccgaaatcccatgcagccaatatctatgagctgccggaggagctggctggtaaggcaatgatactggcaaaaaaaatggcagctaagctgacagaggcattggattgcgacggatttaatattgtacaaaataatggggaagtggcagggcagacagtttttcatttccatatgcatttaattcccagatacaacggtgataaagtaggacttacctggaagccgggaaaacttacagatgaggcaagaaatgaaatacttgcaaaaataaaataatattgatgctttggaggggcaggatattatgacgaaagaagaagcgttcaccgagatttttaatctcttttataagcactccaaaggaatcgcaatgacaattgtcaataatgaggcattagcagaagatgtttgtcaggaagtattcatagagtttctcacgaaaatggataccttggactatacaaattttgaacatgtacgtggatggctgacaatttgttcggatttcagggctaaagactggtatcggagaatgaaacgttacgataaaattgtaaatcgggaagtggaatataaccagctgcacaatgtgttaaataatgtagacagcgtggagcacattgtattaagaaaagaggaatgccgttacagggcagaggttttgaatgagttaaaaagaaagaggccggacgattatcatatgctgatgaaggtacatgtagatggagaaacaccagagtctgtcgctgatgagtatcaaatttcaaaaggaaatctgtataccagaatttacagaagcagactctggatgaggggtgagatgagcaaaaagtataaggattagttgtttcctgaagaggcagtctgggcacattcctcaatgagctctataatatgagtgatggaatcaatgtgcttgcttgcagtcatggcatcaatgtaagactgcctgttgtcataaagctccagaattgcattgagcaaagttttttctgtgatttcttcttcctccagaaccatgctgtaaccctgacgttcaaaggaacgggcattgagaatctggtctcctctgctggcttttgcggagagaggaatgagaagattgggtttatttagggagctgatctcacagatggcgttggcacctgctctggaaattacaagatcagccaaagcgaaaaggtcaggaagttctttttttatatattcgaattgaatatagccttctgttccatttaaagattcgtctactttgcctttaccgcagagatgaacaacctggaagtgcttcaggagttcaggaaggatctttcgaatgttttcattgatagaagctgcccccagacttccgccgatgatcataactactggtttggcagtagtgaagttcaggaaacgcagggcttccagcctgcttccttccaaaagctctttcctgatgggagttccagtgagcacagccttctcggcaggcagcttgtcaacagtctcaggaaaattgcagcagactttggtggcagagggaatgcaaagtttattagccagacccggcgtcatatcggattcatggataattgccggtattttgcagcttttagcagccattaccaccggaacggtgacaaaaccgccttttgaaaatactacatcgggctgtaattgtttcattagttttttggcctggtggagtccctggatcactcggaagggatcagaaaagttctttgggtcaaagtagcgtcttagcttacctgaggcaatgccatagtaggggatttccaattcttcaatgagcttcttctcaataccgtcgtaggagccaatataggaaatgcgatatcctttttcttgtaaggctggaatcaatgcaatattgggagttacgtggccggcagtgccgccaccggtaagtacaatatgtttcatagggttcctcctaatcatagaataatacaatttaactatgaacctcagtgtaaaaaatgtcaaggagagatagaggacacagcgggaaaaaatgatgaaaaaatggaatgaacatgcaaaaaagggagaatgggatgagattctagaggaggcagacagaattgaaaaggagctgggcccggacctggaatatccggctactgacgaggaggtaagggaagcttatcaaagactcatgacccggatcaagtcagagggactgtacgaaaaactcctggaaaaagaggattctgatgaaacaccacccctcccccctgccaaaaaagaaccaccaaagccggaaaagccgtcaaagcttcacgtgcttggaaaatatgcggccatgtttgcaatcactttgattggcatatttgtgttgagtatgactagtgaggcgaatagggagtggctagttaaaagagttaattatgtaattggagatggggtgattctatccacaaaaagccaagatgttgatgagataggtgaattacaggaagaaaaggcaagaattgaaattggagaacaattaaatgttaaagtgccagtacttttttataagccgatacattttcgatatattgactataaaattgatgttgcaggaaaagtagggatgattcactatgagcaagatggtaatatcttaactttttatgtttgtaaagaccaaagattaatagatgataatattttaccagatggtaagctacaggaagaagcggaagtaaagaacgagtatgtaactatcaaattgtatactatagcaaatagtgatggcacggattcgtatatagctgaatgggaatatgaagatggttattatttgttgtctggccaatttaaagcaatagaaataaaaaaaatattgaaaaatgtatattattaactgtgagaaatatttgatttgttcgattcttaatatgtaaggataagtcaaaatagaaaggagcataaatatgaggattaagtcacgtcagctgacggtaattagtttgctgacaattctggggatatccaagataattgttccggctaatgaggtggccgcaaattattcgaatgatatcatctatacttcagaggaaacaacagatagttattcagaagaatatactactccacgagctagaggaacatatttagattttggaaatgcaaaaattgctagggaatcaaatgaagaagttgttttatttggtctcacccaggcgcataaaacatgtgatttgttgtccttatcaatggcattagaacgtaaaattgatggcgcatatgcaacttataaatcttgggatttttatgatgaagattcttattatttaagtcagagcatgtatgttttagtaccaaaaggaacattttaccgtttacgtacctaccattcggccaaggtaggcgtaacgaaggaatccgtcagcgtactaaccaaaggaatctacatcggcgacgatgcctagaaactgaatacacacacttagaaaactgaatacagaattttttgattacaactgaatatggattattttaaaaactgaatatggattattttacaactgaatattgaaaaacaatgaataaaacaaatagtaaaaccaaaacaaaaaaaaataaaaaataggaagagataaacatcgcacctccctggaggacaggaagttttccccatacacagggcagggccttctcaggaaggcaaagctgccatattcccggaattcaggttacggctaattaggtagtgatttatcccgaaattccaaaggcagggagccccgatgcaaaaaaataattttgaacgtatccttatgatcggtcagttgccattgccttaaggaagaacagaatgaatgatggaattcatagacaaagtattttcctagaaatatagaatttcaagtagaatgacgtttaaaaggtcagccagatactccgagtttggctgaccttttcaattgtgcagtgcgtgacgattgttttgtacatgatcaaatttgtacatgatcgaatttgtacatgatcgaatttgtacatgatcaatttgtacatgatcaattcgtacctgatcactttgtacacaatcactctatgcatccacatttcaaacatacccctctataaaaaatatatccctctattatggacaagaattcattggattattctgaaaaagactgttaaaatttccagacaacgtgtataatataaacaataaaagaatataatgaggttttgacagaaaagggggtataaaatgaagattacatttttgggagccactcatgaggttacgggaagctgttattacctggaggcagcgggaaagaagttcctggttgactgtggtatggagcagggaccgaattattatgaaaataaggatatccctgtggcgccaggggaattggattttatgcttttgacccatgcccacatggatcattcgggaaatataccggccatttatgcaaaggggtttcagggaccgatttatgccacggaggcaacctgcaacctatgtgatattatgcttcgagacagtgctcatattcagatgtttgaggcagagtggaggaaccgtaaggccagacgttccggcaaggaggagtatgttccggcttacaccatggaagatgccatgggggccttaagaaattttgtaggctgtgattatggtaagaaaatccagccggcaccggggattcgggtgcagtttacggatgcaggacatttgctgggatctgccagcatagagatctggattacagagggggataagacagagaaaattgttttctcgggagatattggaaatattgaccagccgctgatcaaggatcccacctatctcacagaggcagattatgtggtgatggagtctacctacggtgacagaagccatggggaccggccggattatgtgactgttctggctgaggtgatccagagaacctttgacaggggaggaaatgtggtgattccctccttcgcagtgggccgtacccaggaaatgctgtattttatgagacagatcaagcaggatcatctgattcaagggcatgagggctttcctgtatatgtggacagtccgcttgccaatgaagccaccactattttttatgaacatcagtatgactgctatgatgaggaagccagagagctgatccggcaggggatcaatcccatctcttttccggggctgaaaacctcagtgaccagtgatgactcaaaagccataaattttgatgaggagtgcaaggtaattatatctgccagcggaatgtgcgatgcgggcagaattaagcatcacctgaagcataacctgtggggaagccagaataccattttgtttgtaggttatcaggcggtgggaactttaggacgggtgcttttggagggtgctaccaaggtgaagctgtttggggaggaggttcatgtggcggcagaaatctgccagatgccgggtatcagcggccatgcggacttgaacgggctcctggactgggccaaggcttttgaaaataagcctaagaaggtatttgtaacccatggggaggataccgttacagaaatttttgccagaatgttgacagaggagctgggatatgacaccatggctccgttcagtggtaccatctatgacctggccaataatgtatgtgtctatgaggcccagggaattcgaattgagaaggcagagtccagaaggaatgccaaagctgccagagcctttgaacgtctcctggcaatgggccagaggctgatttcagtgattcggaaaaacgaaggcggcgccaacaaagatttggataaatttgcaagagaagttcaatccttatgtgataaatgggacagagaaatttaaggtacgcggaaccgaaaagggataggaatatttataagaaaaccatatagaaaaccagctaccagcacatgcaggcggcaggaaaagtaccacactggtacggctcctgccgcttttgccgtgacttctccggcggctatattgttcaggcagcgccggtccggggtatatcagaaggtccggctctttattcacaggaatcttcctggtagattacataagagtttttcccagaacgtttggcctggtaaagggattcatctgcgtgacagtacaattcctcaaaggtatggcaggggccctggacaacgatcactccaacagacaaggtgatctcaggcagagggccgggctggtgctggcctggcagagcaccgggatgaaaactcaccagagtttccagctttttcaggcagggatgagggttgttcaagtgggggaggaagatcagaaattcatctccgccgattcgagaacaaatatcggttttgcggaaggtcttttccagaaggccggaaaattccttgagtacctgatctcctgcagggtgcccgtaggtgtcgttcagggacttgaagttgtcaatgtcaaaaatggcaaggagattccactcattggcagcagttttccggagccaggagtaaatgagctgtttggcagcccgccggttataaatgcctgtgagtgcatcccgctctgccttctgccggtaggtgatctctcgtatggtgagctcgtgggtgtccagaaaacggcctacgattctggaacagccgccgtttttatcgggaaacttggcaagctggcactggctccatataacagttccatcctcagaagtaaaggacacattttccacttgcttttccaccaggggaaagtcctttttttcggtgtgaacatgaaaggacgggattttgtcagagcatcgctccttgcacagaaaaggcagaaagtccatgcggcaggggggacgtccaaagcgtttttcaaaatccccgtaaatctcaatggagcaggtggaacaggcaatgtcaaaaacgatatcccctgccatttcagagaggattctccttcgttcatcctggaggaaaagggcattctggagattctttttttctgtggaatcagcgataaatacatagaaaacctttatacccgtctctgtttcaatcaggcggccgtagtcgtccacccagcggatacttccgtccctgcggatgatccggtattccacatagtcgaatgcaccggaaactccctgaacctgctggaggatttctttttctacccgttccaggtcatagggatgcaccatgttccgaaaggaatttttggtaaatattcgaaattcttcttctgttttacacccatacaaatgaaggatatggtcattaacaaacaagatctcctcatcatctgcacggtaaataaaaaatcctcccggaagacaggataggaaagcggtctgggacgggtccagtcttaaaatattgttttcgtaagtttcactagaattattcatgatatccttttctgcgaaaatgattccaatccttcttttgggctgccggaaaaccggaaggccccaggggttgaaacaaagatcagcggatacgttatacctggcctaaagcttcccttaaggctctggaaagctggtccgggcatgaggtggggcggtggccgcaggtggtgccttctaagcgcttgataacttctctggcatccatgccttctaccaattgggcgatacccttggtatttccgttgcagcctcctttaaattttacatcatgaagaatattgtcgtctaattggaattcaatgctgttggaacaaacacctttgcatttgtaaaccattttcaatgcctcctcgtaaatttgtctacaaaaaattatagcagagattaaaaaaagtttccacctaaatttcacatttggtataatggaatcatgagacaattgctattcactgacaacattctgccaggtgtctttatacatggaagcaggaaggttccgggacaaatgtgtgcgttggcacagggaacaaaaaataaaggaaaatcaaaggagacaatcatatgaattgtattgggattataggagctatggaggaggaggttacctgcctgaaggagcagatgacccaggtcactgtcacagagaaggcctctatgaaatttcatgagggctatctccatggaaaaaaggtgatcgttgtccgctcaggcattggaaaagtgaatgcgggaatctgtacccagatcttggtggacaccttcggagcccaggcgatcatcaacactggaatcgcaggttccctgaaaaaggagatcaacatcggagacattgtgatctcccgggatgtggtccagcacgatgtggatgccagagggttcggctatcccaagggacagattccccaaatggataccctgagcttttcctctgatgagaagctgggagatctggctgtggagatctgcagacaggtgaatccggacattcaggtgttccggggaaggatcgcctccggggaccagtttatttccgataaaaaagtaaagcagcagattatcgaagaatttggcggatactgtgtggaaatggaaggtgctgcggtaggccaggcggcttatttaaacggggttcccttcttgatcatccgcgcgatctcggacaaagcggacgacagcgcccaggtagactatcctacatttgagcgccaggccattgcccacagcgtgaaattgaccgaaaatatagtgaaaacagcataatttgtcgaacgatttttgtttcaaaaccggctcccgcgcgctataatatccatacacttaaaaaaggagggtattattttggaaaaaatcatccacttgcagattctattgtactgcatggcagcggcgggactggtgggcgccgcaggactgctggccaccaactttacttacagaagaattcaaagaaacgaaagccacttatcaaacagtaaagaaaggtggcttcttttgtgcagaaaaagggacaggctgttacatagaatgaaccgctttgtgtggtatccggcagtggccagcacagcctttttcctgctggcatccctgcttcagtggatcgctaagacgccggagggactcagcgtaaggtatgtgtatctgctggccggtgttcccttaatgctcctgcttctgcgcacctgcgtggacatttcttttaaggaagagaaggccctgcagtccctggcggactatgtggagcatcccaggagagctctcacggctgcagcaggcgaggtggcgcaggagaccagacaggaggcaaggccggagaagaaaacagagtccagagcctcccttcgggcagccaaggctgagaaaaaagcagaggcgaaggccagagccaaggtgaaggaagaacctgtccagacagagaatctcaatgagcgggagcaggaaaaggctttggaaaatatcacagaagcgatccggcagacagcggcaacagacagcaaatttaagaaaatgctgactccggaggagacagagatcatgaaagaaattattcgggaatttatggattagaaagattgcgccctaagaattttagggaaaatccggcaaatatcttgtggaaaaagagacaatttgatatactgaaatttattaaagggaaatcctcgtagaaagaaggagcgataaacatgagcaaagtgacgtttgattattcaaaggcggcctgttttatagcagaccatgagatggaaaacatgagagccttagcagaggctgcaaggcagacacttgtcaccaaaagtggagctggcaatgattacctgggctggatcgatctaccggtagattatgataaagatgaattcgcccgcattcaggcagcagctaagaagattcaggaagactcagacgttctgctggtgatcggtatcggcggttcttatctgggcgcaagagcagccgttgaattcctgagacacggtttttataacaatgtgtccaaagaaatccgcaagacaccggaaatatactatgttggaaacagcatcagttccagttacatcaaaggcctgatcgatgtgatcggagacagagatttttccgtgaatatgatctcaaaatccggtaccaccactgagccggccattgcgttccgcgtatttaaggaaatgctggagaagaaatacggaaaagaaggcgctgccaagagaatttatgcaaccactgacaaggccaagggagctctgaagaaggttgcggatgaggaaggctatgaagaattcgtagttccggatgatgtgggaggacgtttctctgttctcaccgcagtgggtctgcttcccatcgctgtcagcggtgcagacttagataaattaatggaaggagcagcatctgcaagagagctggctctgaacaatgcatttgaagacaatgacgccatgaagtacgcagctgtccgcaacattttgctgcgcaagggcaaaaatgtggaagttctggccaactatgagccaagccttcactatgtaaatgaatggtggaaacagctttacggagagagcgaaggaaaagaccagagaggtattttccctgcagccgttgacctgaccacagaccttcattccatgggacagtttatccaggacggcgccagaattatgtttgagacagttctcaacgtggagagatccagagatgagatcatcatcaacgaagagccggtggacctggacggattaaattatctggcaggaaagacggtggactttgtaaacaaaagtgccatgaacggaaccattctggctcataccgacggccaggttcccaacctgcgggtggacattcctgagcagaacgagttctatctgggacagttgttctatttctttgagtttgcctgcggaatcagcggttatctcctgggagtaaacccattcaaccagcctggcgtggagagctataagaagaatatgttcgcccttcttggcaagccaggatttgaagcacagcgagaagagctgttaaagagactgtaattcatgaaaatcgttattttagaagggaaaagtgtgggtgaggacatggtcttcaccccttttcataacctgggggaagtggtgatctatcctaagaccgcaccggaggaaatgccggagcgggtggcggatgcggatatcattgtggcgaacaaggtccccatgtgtgagaaaacattaaaaacagcaaagaacttgaagctgatctgtcttacagccactggaatcaataatctggatggggaatacctgaaatccagggggatccaggcccggaatgtggccgggtattccacagaggctgtggcacagcacacctttgccctgctgttttatatttgggaaaaattaagcttttacgataagtttgtgaaatccggcgaatatacaagaggacaggatttctcctgttttccggagcggttctacgagctgtccgggaagacctggggagtggtgggactaggcacgattggcagccgggtggcccagatcgcccgggctttcgggtgccgggtgatctgctattctgcctctggacagaaatatgacacggagtatgagcaggtggatttccagaagctgctggagcagtcagacgttttgtccattcatgctcccctgaatgcccacacagaaaaattatttgatctggaggcatttagcaggatgaagcgggatacggtgctgatcaatgtggccagagggcccatcgtggatcaggaggctctgtatacagccctcacagagaatcttattggaggcgcggccttggatgttctcaaggaggagcccatgacagaagacaatcctctgggaaagatccaggacagccggaagctgatcatcaccccccatatggggtgggctcctgtggagacccgacgccggtgcctggatgaggtggtgaaaaacatccaggcctatcttaaaggagaagacaggaaccgggtatattgataaacggataagaaaaagatgaggagtctgcccagggggatgcctcatctttttgtgttttcttttttcttggaagcggtgaaatttctatcgctgcctgtttccaaatttgtgaataagaggtataataaatacgtaggattctgctgattcgtgaacctggtttctacaaagaaacggaggagaatgtatgaaaaaaagaggcttggccatgtgtctggcactgtgtttgacatttttggcccctggggcccaggtcagtgcggcagcgggaggagcttttgctgacgaaaatgcggtttatgaagaggagcctgggatcgtctcagagggcctcagcgttaaagcagcaggtttggaaaccccgaagctggtggggattcagagaccatccaatcaggacaatctgctggtgatggcctggcagacagttccgggagcggaaggctaccggatttaccgcagggaggcgggaaagggatggaaatacctggcccagaccagcgccacggtttttcaggatgccacgggggtgtcaggaactctctatgcctatacggtccgtgcctatgccagggagaatggaaaaactatactcagcggctatgacaaaacaggattgaggggaacgcctttattgggcaggatcgctttgggaggctgcttataccgctcacctacccaggcttatgtgcagtggatgccaggcaaaaatgcggagggatattatatatacagaaaggttcccggcggccgctggtcaagagtgggcaaggtccagacaaaggacctgaaggccggtacaggggaatatattgataaatcctgtgcagcgggcagggattacatctatacggtccgtggctatgtaactactggccggggagaggtacaggggctgtatgacaacacgggagtaaagaccaattatgtaatccctcatatttctaatcttaaggcaaacgctgtatccaagaaggggattaccatttcctggggaaaaacgcagatggccaatggataccgtatctatagaagaactggaggaggcagatttacagctcttaaaaatacatcctccaacacttttacagatacaacggtgacagctggaaagacctatgaatattgggtccggggatatctaagaggcgcggatcaggtgcgctggggtgtgagctataattacagcacgccttcttcctatagtacagttaaggccacggcaaaatagaggttagaaagtaagaacgtgtatttgaaaaagtaaaaataagcaataaaaaagtgcctgtgctgccagtaaagtgaaagcagcagaggcactttttccgtattttaaagtgatctttgtgtcttgcacaggtatctttcaggggatcctagtggtcctttcggtgctaatcttcttcgatcacttgaatttccagaaaatcaaagtcaatgtgttcaataaagttatcctggctgaaccgtgcccggtcatgcttctggaattctttcaccgtggcgtccagccagatgggattttccagatccaggctgtagcagatctcttccagacagtggaacaccttgtgggtgcgggtatcttggctgtcgtcacaggctacggtatcctgaagaagatggttttctttccaaattttaccccataaacgaaacatatgaactctcctgttgtattttccctttgcccaaataaagggcagacatgtttttcctgcagacaaaagccatgatttgcggaccttataaaagatttgcggaccttaaaaggcatttgcggctttaagaaggattcccggccggaaggcagcctatgcccggaaataactggcaccagagggcagggtctgcaggaccgccgctggttatcagtatatccgcaggctggaaaaatgtaaatagtttttttctgtccatcacacagcgtgctgctgggaatgaacgctttacacttccgaagaaatcaactataataattacaattgaaaattttatagaaaatcaggaggaacagccaatgaaattatatgacggcggtgtatatctgttaaacggaacagagattgtggaagaaaacggcccgtccattcctatgtcaaaagaggaagcagcgaaaaataccatagcttatggaattctaaaagctcacaatgtttcaggaaatatggaaaagctgcagattaaatttgataagcttacatcccatgacattaccttcgtggggatcatccagacggcacgtgcttctggactggagaaatttccagtgccctatgtactcacaaactgccataattctctgtgtgctgtaggcggaaccatcaatgaagatgaccatatgtttggtctcacctgtgccaagaaatacggcggcgtctatgttccgcctcatcaggccgtcattcatcaatttgcaagagagatgcttgcaggaggcggcaggatgattttgggctctgacagccatacccgttatggcgccctgggaaccatggccatgggcgagggtggaccagagctggtgaagcagcttttgagccagacctatgacattaatatgccaggtgtggtggctatctatctgaagggtgagccaaggcccggtgttggcccccaggacgtggccctggctatcatcggacaggtctttgccaatggatatgtgaagaataaagtcatggaatttgtgggacctggtgtgtcaaagttaagtgcagatttccgtatcggcgtggatgttatgaccacagagaccacctgcttgtcctccatctggagaaccgatgagaagattgaagaattttatgccattcatggaagacctcaggattataaggaactgaatccaggccagatggcatactatgatggctgcgtggaaattgacctgtctgagatcaaacccatgatcgctatgcccttccacccaagcaacacctacaccattgatgaactcaatgccaatcttttggacatactggaggatgtggagaaaaaagcacaggtcagtctggatggaaaggtttcactcaatctgaaggacaaggtcattgacggaaagctctatgtagagcagggcataatcgcgggctgtgccggcggcggttttgaaaatatctgtgcagcggcagatatcttaaagaatgccagcatcggagcagacgccttcaccttaagtgtttatcctgcaagtacgccaatttatatggaattggcaaagaacggggttctggcccagcttctggcaacaggagcggttgtgaagacagccttctgcggcccctgcttcggcgcaggagatacaccggccaacaatgccttcagtatccgccataccaccagaaacttccccaacagagaaggctccaaggtacagaatggacagatttcctcagtggcattgatggatgcccgttccattgcagctactgcggctaacaaaggcttcctcacctccgccgaggagtatcagggaacttataccaaccagaagtatttcttcgataaaaccatctatgaaaaccgcgtatttgacagtcatggagcagcggatcccaatgtggagatccagttcggaccaaacatcaaggactggcccgttatgcctgccctggctgaaaacctgctgctgaaagtagtgtccgaaattcatgatccggttaccaccacagatgagctgatcccttccggggagacttcctcctaccgctccaatcctttggggctggcagagtttaccctgtccagaaaggaccctgcttacgttgcaagggccaaggagatccagaaggcagaaactgccattcttaatgacgaatgtcctctggaagctgtccctgagctgaaggcggttatggaagtggtcaacaggcagttcccagacgccggcaggggtaatctgggagtgggaagcaccatctttgccgtgaagccaggtgacggttctgccagagagcaggcggcctcctgccagaaggtactgggaggctgggcgaacattgccaatgagtacgctaccaagcgttaccgctccaacctgatcaactgggggatgctgcccttcctcatcccagaaggagagcttcccttccacaacggcgactacctgttcttccccaacatccgtacagcggtggaggaaaaagcagatgagatcaaaggctatgtggcagacgggcaggagctgagagaatttactgtgagccttggagagcttacggatgatgaacgtgagattatcctcaagggctgcctgatcaattacaatagaaaataaagttcatggttccagtatatctggaagcatccttctttccccggcttgttctccaggccggggattgtttgtggtacgcggggaccctgacaaacacacaaggctgccaagcctttcatgagtgtgagatgggaaaaggtttccaacttggggtcctttgttgcgccgctctgccaagcctctcatgggtgtgagatgggaaattgaagggggtttacgggttttgtttaaaaagatttaattatctgaaaataatgaaaaattcagaataactaacagttttaaattgagttaatcttttgaaaataattaatttgaaaaaatgtggaaaatagtattgacaaaagcctggcggtctgctattataatcacatcaaaagaaaacaaaaccaaagcacataagaaaagaaattcattcaattcatagtatatatgtatctatcatgaagcgaatgagtaagaagaaagggtaaggtgattccgttgaaaacatgactttcccacaatcaataagaaagtggtaacatgaagcgtttcctgcaagaaagacctgatacgataagcagaaaaaagaagcgattcgaaatctgggagctgcattttataaaaaaagaggatgctgacttaagaaccagaggttatcatgataatatcgcagtatgataattaaataaaagtaaagactgtttctgtatattgtattttatttatttccgtaggagatatagaattaggattcaaaggttcgtgtaattataatgtcaactataaatacataaaggttcgtgggatccattctatatacagttagaagtaagatgaatgtattatatatagataacaaagaaataattaaaaatggttccaatctctatccaggaggtgaaagactatttataattagctgaccgacaggccagaatgtttcagaagttcaaagatgattgtatcaacaatgattggagacagaaatagaaaacagtccattactataaaacttatcagaagggtatttgaaattcgataactgaaaatactgggggaagcagtaatcaagaatttataagtgcaatgaagaagatttggatagaatgtatcataggtatatagtagctcatgttcttattgaacaattaccacagacctggtacaaagattttgatctttgtgtgaagaaacaagattcaaaaggatataactactgaattccatagaagaaacagagaaaagaagttttcttatttcctcatcagtgaatggatcagcaagatatcttgacatccatattagtaatttgggaatatggagggaagctttgcatcagaagaatatcttcttacaaaagatattgagagagaaggaatcaaaagagcttttcttagtaaaggtgaaagtggtttcaggtttcagaagtgagattggaaatcctttggtagaaagaaaagtatttcattgtttcttccaagttcgttgaataatattccgtaaaatgttattcaaaaatctatataactttctaaataaattgaatgatgataaatcatatcatttatgagcagggaattaggataagagataaaagacataaaacaaaactgaatagagataagtttttcaagaagaaatttatttaagaaaaaacgtatcatagacaaaacgaaaggataaaaaattgaataaagaagaatgttaagacggtcatcatttttgaagtttgaaaatggtgaccgtcttgtgttgtggggtgaaattgagtataatagaagccatgatacagatggaacatctgggaaggtttgaggtgactgagatggcagtgctgtttctggttgaaaagggaattttgtttgaagataaggatttacttgtatgctataaggaagcgggaatgccggtgcagagtgcgggatttatggtcatggacatggagcatgcgctgatgaactatctggcggaaaagcagccggggaaaatgccttatgtggcagtggtgcaccgtttggatcagccggtggagggtgtactattgtttggaaagaatcaggaagcggcaaggaagcttggagcccagctgaacaatggacagatggagaaaaattatctggcagtggtttccggaagatctgaaaagaggcaaggagcccttacagattttctcaaaaaggacggaagaaggaactgttcctttgttgtacccaaaggtgcgccgggaggtaaggaggcgcgtttgaaatatgaggtcctggaagaaagggacaagatgagcctgcttaaagtaactctggatactggacggcatcatcagatccgggtgcagctggccaatgctgggcttcccattgtgggagatcagaagtacggcagcggacaggagaaaggaaacctggcgctgtgtgcgttttccctgcgctttatccatccccgcacagggaagaagctatgctttcaagtgaaacccaagggagaggcatttcagaattttttatattgtgagacactgtaaatgagagctggtgtctgtgaaggtcttttcagtgagtgataaaaaagtataaagcgaggcttttctgccatactaatcccaaaacgacaaaggaagacgggcatggaatggaaaagaagagcggccattgccgggattgtcataggagtatatgcgggctttcgatatcttcttcctgtgacagttccttttttgttgggatggattttggcagtgtggatctatcctttggcagtgaagacagagaaacggctccccgtaaagcgtagtacggcgggctttatttatatccttttgattatggctatagcaggctttctggtgtataaaggagtggaagtgctttttattcaagtgaagctggcggtggccagctggcatgggcttgaggactggggtatgaaggcgctgaaccagtgctgcacggttctggaggagtggacggggattcaggctgtggataccaggaaatatgtgctgaatcaggtgaatcaaatgcaggcctccctgctggagaatttaagtccggccacggtcctggatgccctgtccagcctgaaatggatcttgtccttgggctccggggtggtgatcgcctttatttccagcattttgtttctaaaggatatggaagagctgaagcggaaaatacggggcacacagtggatgacgggggcgcgtcatgtgatgaaacggctgaaaagcaccacagtgatgtacctgaaggcccagattttaattatgtctgtcattgctgcagagtgttccctgggattttggatcatgaaaagtccctattacctccttttgggggttggactgggccttttggatatgctgcccattattggcacaggcacctttctttatcctgcagcccttgttctgctgatccaggggaagacctcagcggccatcggctgtgtgcttttggatctgctcaccagcattaccagagagtatttggagcctaaggtcctgggaaaaagccttggggtttatcctgtggtgatcctggcggcggtttatgggggcttttttgtgtatggatggccgggcttcctccttggccccttgtctgcctccctgatctatgaaatcgggagggagtacgacctatggggatgacaagaaatcatgaaaaaagtatgaaatctatggacggcggtctttttttgtgtataatggaaaaagaaaattgaccatggccttattgtctgaaggaggaaacggtaggagatgaagaaaaaagcagtgattgttttgggcgtttctgctgtgcttgcgttattgtcatccatgaatattattgccggtgagggagaggaagaagaacaggaacgcatggaacaggaagcccaggatgaagagatccagtcccccatagagattgaagaaaatctgcccattgaaaagggtgagagaatagcagtggtggctaagaccacaaagggaagcttctggaaggcaatggagcagggtatgaaggatgccattgcctatatcaatgagctttatggctttacagatgatgagaagctcaccatgacctttgaaggtcctgacaatgaagaaaatataacggaccagatcaataccattgacgctgtgctggcggaaaacccaggagctctgtgtctggcagccatagataaggattcctgtcaggctcagctggagacagccaaggagaacggcatccctgtggtgatgtttgattcttatgtggaaagtgatctctatgctgcctactgtggaacggacaatgagaagctttcagccatggcagcccaggagctggcagacagcatgggaaataagggccaggtggtggtctttgcccaccagagtaagacccagaccagtgtccagagagttgaagggtttgaaaaggcggtccatgaatttccggatatgtccgtggtacaggtgctttacagtgatgagcaggaagacatgagtgctgccatggagacctttttggaggaacacccggatgtgcagggagtgtactgtaccaatgccaatgtggcagatctgtttttggaagtggaaaagaactttgaggacagggagttcacttttgtaggtgtggacggggacaaagagcagcagaaggctgttgcggaaggcagagagcttgggattgtagcccagcagccctatttgatgggatttcagaccatgtacctggcagtgaaggccatggcccaggaggacacccagggacccgcccgtcaggttttgctggatactgcctggatcgatgcccagaggctggaggatccctcctatgcccaatatttggattcataattatgccatattttacaaaaactaagcaggagacaaaggtgacttgtttcctgcttagttttattaaggaaagaaaatattgactattggtcatttctgtgatataacagctataccataaatgactaatggtcacaatagctttttcctgattttctcgtgcactttattagcactggaaagggaaaaagtcgatttatgtataatgaccaaaaataggttgaatcaaaaaagagattatggtagaatttgactatatgaaaaaaaggtggtgacacaatgatacaggacacgatcaaagctgtacaggaagctgaggccaaggccgagcagatcgtaaaagatgctcaggcccaggcccagacactcttggagaaggcggacgcagacgcggcggctctggtggaagaccggaaaaaagcagcgaaggcttcggcagcagaggctatggaaaaggccgaaaaggatgcgcagggagcaggaagccagcttcttgagaatgtacagaaggaaatcgctgtattaaaagccaatgcttcaaaaaaagaagcccaggctgtggatatggtgatttccagtctttattaaaatgtagcaatgcatttttaaggaggaaggagaaaaaaagtaaaggaggtatgtggatatggcagttttgcagatgcaaaaattaagtatctgcgcaatgaagaaaaatcgtaaagccatattggaagagcttcagaagctgggggtcatggagatcgacacatccatgagcaacgaaggcctgatgaagatggacaccctggaatccagacagtcatttgagaaaaatgccagtttgtgtgaccaggccctggaaatccttcaggaatttgttcctgagaagaaatccatgttttccgctctggagggaaaggcgttggtggatgaggctgtctttgacaaggctgtggcaaggaaggcccaggtgatccacaatgccagtcagttggtttccctgaagaaaaagctgcttgaaaacaaggcagctattttaaagacggagacccggattgaggctttgacaccctggctgtccctggatgttcccatgaattattccgggacaaagaagatggcggtggtcattggaagtatcggcggctcagtaaccatggaggatgtgtacaagcatcttgcccagagtgcaccggagctggaggcatttgatctctatgagatccacaggtcagaggagcagctgtgtctggcagccgcctgtctcagagaagaggaggcagcgctggaagaggcccttcgatccatgggatttgcaagaccggctcaggtgatccgcagggttccccagcaggagaaagaacgtctagaaggcaagaaagagcatctggtctcggaatgtactcatattgaagagcagatccgggagcaccaacaggaccgtgaggccctgcggctggtttccgactatttccggtccagatcccagaaatatgaaattctggggcagatcgaacagtccaggcagacgttttttattaacggctatcttccaaagaaacaggttccggctctggagaagcatctcacggagaagtttgatctcatcctggaggctgaggatgccgacggggatgaagttccggtggtgttggagaatggcaagttttccagcgccgcagagggagtgcttgcttcctttggtcttcctgcaaaaggggagatggaccccaccaaggtcatggcagttttttacgtttttctttttgggttgatgctttcagatgcagcctatggactgattgttttcgtggcctgcgctgtgctgttgaagaagtttcccagaatgtctgaggggatggcaaaatctatcagactttttatgtactgcggattgtccacgttattttgggggattttattcggcggatatttcggagatttggtaaatgtggtatccaggaccttctttggcaaggaggtggccattgcacctgtgtggttcgcacctttggacgaccccatgaagcttttgatctattccatgctctttggtctgatccatttgtttgtgggagttggcatgaaggggtatatggagctgcgggataagaagtatttggatttcttctgcgacgtggtgctgtggtatgctatgcttatcggtcttttgattattttaataccaagtgatatatttaaatcaatctcacagatggacattacatttcctcctgcagtgaatatgctgggcaagatcctggccataggcggagcagtgggaattctgctgatgtcaggacgggccaacaaaaatcctgctctcaggatcgcccttggcgcgtatgatctgtacaacattaccggctggctgagtgacattctttcatattcccgtcttctggccctgggactggccacaggagttatcgcttctgtagtgaaccagatgggaagcatggtaggaaagagcgtttttggcgtgatcgtgtttatactggtgttcatcgtcggacacacctttaacattgccatcaacctgctgggagcttatgtgcatacctgccgtttgcagtatgtggagttttttgggaaattttatgaaggcggaggaaaagcctttcatccattcagagcaagtacaaaatatgtagatattaaggaggaaacaaaattatgagtggtattgtttgggcattaatcggggcagcgagtgctgtgattttcgcaggaatgggttctgcgtatggtgttggtgttgccggacaggcagcttctggagttgtgacagaggatccaagtaaatttgcaaaagtattgatcatgcagcttcttcctggtacccagggtatttacggtctgttggtggctttcattgccctgtctaaggtaggacttttggggggaaccgttgcagatttagatataagcacaggtcttttgatcttcgtagcctgcctgccaatcgcacttgttggtctggtatctgctatgcatcagggcagaacctctgtggcagcgatcggtattgtagctaagaaaccggagcagtttggtaaagctatgctgttcccagcaatggtagaaacctatgctattctggcacttttgatctccatcctggcaatcaccgctattcctgtataagaggaagcagccaggccttcttaaggtaagaacacaattaagaagacacgtgaataatgaataaggagagcgaaaaggatgactggattagataagataatcaaccagattcttgatgaagcaaataactccgccagtgcaattttggaagaagccagggaaaaagccgaggaggttttagctgtggcagcttcccaggccgacaaggcagaaaaggatattcaggagaaatctgcatctgccttaaagagtttccaggagagaatggtgtcttcctctgatctgaaacgtagaactgctatcctgcaggcaaagcaggagatcatcgcagaggtgatggcaaagtcctatgacaccttcttgaacaaggaggatgtccagtactttgagatcatagagaagatgatttccaagtttgctctggcccaggaggggatcatttatttctcccccaaggatatggcacgtatgccccaggggtttgaggcaaagatccaggagattgcagcgggcaagggcggaagcctggccctgtcccaggagaccagaaacctggagggcggctttgtgcttgcttacggcggcattgaggaaaattgttccttcaaggcattatttgattcaaagagagatgaacttcaagataaaatacaggcagtattattttcatgacagcgctaatccgcgaaaaggagggtaccaagaatgtctgacaaaaagtatacctacgcggtggcgcgaatccgtgcattagagatgaccttgctttcccaggccgtggtggaacagctgctggcatgcagggacgagaaccagtgccttcaggttctcgctgagaagggctggggaggcaatgagggttccatgaatgcagatgcaatcttaacccgggagagagagaaaacctgggagctgatggaagaattggtggatgatatgtccgtgtttgacgtgctgacctatcagaagcagtttcacaacctgaaggctgccatcaaagaggtgtccacagaagagaaaaacgccagaattttctataatgactgcggtatgagcggcaaagaaatgctggatattgtctcttccagggatttttccagacttccggccaatatggtacaggtggcccaggaggcctatgacaccttcctgcacacaagagacggccagctgtgtgatattatgattgacagggcaaccttggaagcaatttatgaggcaggcaaaaaggcgaaggaggacatcatccgccagtatgccgagtctgtagttgcagtggcagatattaagattgcggtacgttcgcaaaaaaccgcgaaatcattagaatttatgaaaaaggccatggtggagtgcgattccttaaacctggaggagcttcagaaagcagccctcagtggaatggaagcgatctgcagctatctggcagataccagatatgcggcaggagctgacgctcttcgagagtctccttctgcctttgagtgctggtgcgacaaccagatcattgagaccattcggcctcagctgtataatccatttaccattggtcctcttgtggcctatgtgctggcaagagaaaatgaaataaaaacggtaaggatcatcctgacaggcaaacgaagcggtttgcccgaggaggctatccgggaaagggtaagggaaatgtatgtataaggttgcagtaatgggcgattacgacagtatttacggttttgccactcttggcctggatacctttcccacagaaggcccggaggctggcaaaatccagctgaaccgccttgcagagggtgattatgcggtcatctatattaccgagaagctggccgcacagctggagcatgaaatagagaaatatcgccaggctttacttccagcgattattttgatccccggagtgtccggcaacacaggtgcgggcattgcgggcgttcataaatccgtggagcaggccgttggctctgatattctttttggaaataaggactgataagagcaatcggtctgttaggtagtgaaaaatctgaaagcaggtgatttgtccaaatgagcaaaggaacgataaagaaagtggcaggaccgctggttatcgctgagggcatgagagacgccaacatgtttgacgtggttcgtgtaagtaatcagcgactgatcggtgaaatcatcgagatgcacggagacgaagcgtccgttcaggtatacgaggagacatccggtctgaagccgggtgagccggtggaatccatggaggttcccctttccgtagagcttggaccaggcctcattgccagcatttatgatggtattcagcgtcccctggatgagattatgaaggttacccacagcaacagcctgaaaagaggggttgaggtaccttccctgaaacgtgataaaaaatggaaattccagccagtggcaaaggtgggcgaccaggtggagggcggcgacgtcctgggcactgtggaagagaccatcgttgttacccagaagatcatggttcccccaaatatgaagggaacgataaaagagatcaaggccggagagttcactgtggaagaagtggtggccgtgctggctacccaggagggtgacaaggagctgaccatgatgcagaaatggccggttcgtgtaggccgtccttataagaaaaaacttcctcccaaggttccccttgtaaccggccagcgtgttgtagacaccatgttccccatcgccaagggcggtgtggcagccgttccgggacctttcggaagcggcaagaccgttatccagcatcagcttgcaaaatgggcggaagcggatatcgtggtttacattggctgcggtgagcgtggaaatgagatgacggacgttctgaacgagttcccagaactgaaggaccccaagaccggccagtctttgatggagcgtacagttttgatcgccaatacctcggacatgcctgtggcagcccgtgaggcatctatttatacaggtatcaccattgcagagtatttccgtgacatgggctattccgttgccctgatggcagactccacctcccgttgggcagaggctcttcgagagatgtccggacgtctggaggaaatgcctggtgaggaaggttacccggcttacctgggttcccgtctggctcagttctatgagcgtgccggccatgtggtctgcagcggcaaggatgaaagagaaggagccctgacagccatcggcgccgtatctcctcccggaggtgacatttccgagccggtatctcaggcgaccttgcgtattgtaaaggtattctggggactggattccaacctggcttacaagcgtcatttcccggccatcaactggctgaccagttattccctgtatctggacgatgtgggcccttggttcaacaagaatgtggaagaagactggatgactctgcgccagaagatgatgacccttcttcaggaagaggcagagctggaagaaatcgtaaagatggtaggtatggacgccctgtctcctggagaccgcctgaagatggaagccgcccgctccatccgtgaggacttcctgcaccagaactctttccatgaaattgacacctatacttctctggagaagcagcactacatgatgcagctggttctggccttctatgaaaaatctaaggaagccctggacaaaggcgccagcatcaatgacctggtgaaaatggctgtccgggagaagattggccgttataaatatacggttgaagataaactgacacaagaatatgaggcagtgaacaatgagcttcacgctgagattgccgaagtattaggaaaggaggactaggacaatgccaaaagagtatagaaccatacaggaagttgccggtcctttgatgctggtacagggtgtagagaacgtggcctatgacgagctgggagagatcgagcttgccagcggcgagaccagacgatgcaaggttctggagatcaacggaagcgatgcactggtgcagctgtttgaaagctccactggtattaacttaagcaacagtaaagtacgttttcttggccgaagcatggagctgggtgtatccggcgatatgttgggccgtgtatttgatggtctgggccgtcccattgacgatggtccggagatcctcccggaggagagaagagatatcaacggtctgccaatgaacccggcagccagaagctatccccaggagttcatccagacaggagtgtctgctattgatggtctgaacaccctggtacgtggacagaagctgccaatcttctctgcatctggtctgccccatgcccagctggctgcacagatcgccagacaggctaaggtgcgcggcaatgacgagcagttcgccgttgtgtttgccgctatgggtattaccttcgaggagtccaacttcttcgtggaatcctttaaggagacaggcgccattgacagaactgtactgttcatcaacctggccaacgaccctgcggtagagcgtatcgcaactccccgtatggcactgacggcagcagagtacctggcttttgagaaggatatgcatgtcctggttatcctgactgatattacaaactatgccgatgctcttcgtgaagtgtccgcagcccgtaaagaggttcccggacgccgcggttatcccggctacatgtatacagacctggcttctctttatgagagagccggacgtcagaagggaaaaaatggttccattaccatgatccctattcttaccatgcctgaggatgacaagacccatcccatcccagacttaacaggatatattacagagggacagattatcttaagccgtgagctgtacagaaagggcattacaccgcccattgacgtactgccctccctgtcccgtctgaaagataaaggtatcggtgaaggaaagaccagagcggaccactctaataccttgaaccagctttttgcagcttatgcccgagggaaggatgccaaagagctcatgaccattttgggtgaagccgcactttctgacgtagacttgatctatgcgaaatttgccgatgcctttgaggcagagtatgtatcccagggttatcaggcaaaccgtgatattgaggagactttggagattggctggaagctgctttccatccttccaagaagcgagctgaaacgtgtggatgacaagttcctggatatgtattatggaaaatactaggaaggtccccattcgcttaaggaggtgaaggaatggcatcaacacaggttaatcctaccagaatggagcttaccaaacagaagaaaaagctggtcactgcagtgaggggccacaagcttctgaaggataagcgggatgagctgatgcgccagtttctggacctggtgagggagaatatggttctgcgtgagaaggtggaggcaggcatccgttctgccaataccaattttgtcatcgccaaggcaggcatgtctgaggaggcgctgaacacagcccttatggctcccaagcaggaggtctttctggagacagacaagaagaatgtcatgagtgtggatattccggtatttgaatacaagaccagaacatccgatgccaatgatatatattcctacggttttgcctttacgtccagtgacctggacggagcggtgaaatccttggcagatatcctgccggatatgctcaggcttgcagagagtgagaaggcatgtcagctcatgtcagcggagatcgagaagacccgccgccgtgtaaacgcccttgagcatgtaattattccggaaacccagaagaatataaaatatattacaatgaagctggatgaaaacgagagaagtacccagatccgtctgatgaaggtgaaggatatgatgctggaagaggctcatcattacaaagaacgccaggcaaaagaggcgtgaaaaaacattgaggccggggaaattaattccctggcctttttctctagaaaaatatcagctagaccaggatcaaataaaaaatgcatccccattccagccgctgacggctgcgggaataccctggcgggttttataattcccgtaaaaaagtaaagtttataaaattctaagaaataagcctcttgttcaagtaagcagggaagtgtataatgtaaatgaatagtatcctataccgttaatacactttgtttctgtggaggacttttataaggctgatgtgcagggcaaagaaaaagcttacggacgattgtggaataaggggaagtagaatgaaaaaaaatagcagatggaaaattatgatcaccacggtgatgacggtgatcctgctgctgcagccggttctttgccaggcagacagctttggagggcaggagcaggtgcacaggtccagccattcctacgttacgcctgggtatgaaagtctttaccggctggagcaggaaggcggagaatggcaggcccagcaggaggcgccggtctatggggcaggggagaagacctttacctctcaggcccaggtagtgaattatatgaagcagcagatgcttcagagaaaatcaaccattacctttactttaaagggggtatctatctccagtgtatgggaatggtttgacgtggtttttgagaaggccacccaggatacgtccagcacaaaacccaacgagggagattatctccgctggaacacagtgggatacgaagccagtgcagtttataatgatgaggcaccctggtacacccttacttacaacatgcagtattgctccaatgcatcccaggagaagcaggtggatgccaaggtttctcaggtgctcagctccctgaagctttccgggaagaccacctatgggaaaataaaggcaatttatgattatgtttgcagtcatgttacctatgattatgcagggctcagcagaggagaggcgctctctcattctacttacaaggcccttgtgaagggtacggctgtgtgtcagggatatgccacattgatttaccggcttatgcgggagagtagtatcccctgccgtgtggtcactggatacagctccggagaagcccatggatggaatatcgtgcgtctgggcagccagtattacaatgtggacagtacctgggatgcgggaaagaatggagattatgagtttttccttaagagcaacggggattttccggatcacacaagggattatatgtatctcaccggggttttccaaagagattatccagttgcctccgtatcctttgaccctgtcaacgacaagcctggaacgccaaggctggtaagtgcggtggctgcagattacaataagatcaaggtcacctggaataaggctgcaggggcagaaggctattatgtataccggaaatatggcaataactcctggcagagagttgcctctgtgtcagcatccacagtctcctatgtggataccaaggccgccctgggtgtgacttacacgtacacagtgagagcccacaaaatgagtcagggaaagaatgtgctgggcggttatgtaaccgcgggagtgaaggctgccactgccctgggaatacccaaggtgaaggctgtgatggtgagcaagaagcaggctaaggttacctggagtgcagtatccggagccacaggttatgtggtataccggaagctggctggaaccaaaagctatgagaggctgaaggtggtttccaagaataccttggaatacaaggacaacactgtgaagaatggaaagagctatgtatataccgtgaaggcctaccggaaggtggcctccaagaattactacagcagctataaggccgtttctgcaaaggccgcataaggacaccccacataaagagaacaacagctaggcgctgccgcatcagtgatggaagcattacttgtgcggcagttcttttattgtatagaagtgagggggagttgaagcgggcttgcccgctttgttgtagaacacaagccctacacgaaaccgcttaagcccacgaagaagatctccaccgacaataaggaaacaaaaacagcatatataaccgtaaagacagaggtaaaaacggagaccaaggaaaaatacacaaagaagtctaagattaaagttgtgaccaaaaagatcacaacaacggtgacaaccaccacaagggaaaaagctcctcaaatagcaaaggtggcaactccacatacggctgatatcaggcagcttgcacctaacatggatgcccgtgtgctcaacgcttttgaggaactggaatttcgtgtgacagtggaaccggatgctaaatttgcaggacattttgattcaggcacagcaaagataattttgaagaatgaggatgatacgatttatcatgagcttgggcattttgtggcatttttgtcaggaaatgcggacaaggagcaatcctttataaatgcctataataaagaaaaggctctttataaaggagcgaacgtatcctattcaacccaaaacagctccgagtattttgcggaatctatgaaggattatgtgcttaacaatgcagcgctgaaggcctccagacctgagacttatcaggcagtttcacaggccattaataggatcacgccggaacagactgccagagcgaagaaaatatatggctcaatctggctgaaggcaaacagttagaaaaatagaagcatatcaggcgggctgccgcactggctatcattcgttggccgggtggcagtccctttttgttactttaaattactttaacgcataaatgcgttgacaccataaaatataagcggtacaataagatattagagaataacaagaggaggtaggcctatcttatgaggaaattaatgacaggtgacgaggcaattgccagaggggcatatgaagcaggcgtgagctatgcttccgcatatcctggcactcccagcaccgaaatattagagaatttagctacatataaagagatttatgcagagtgggcacccaatgagaaggttgccatggagtctgccataggagctgctattgcaggccagagaagtatggtttccatgaagcacgtgggaatgaatgtggctgctgatccaatgtttacctgggcttatatgggggtaaacgcagggaatgtgatcgtgacggcggacgagccgggcatgttctcctcccagaacgagcaggacaaccggaattatgccaaggcggcgaagatcgccatgcttgagccctcagacagccaggaatgtattgatatgatgaaggcagcctatgagctgggagaagagtatgacaccccctttatcatccgtatgacaaccagaatctgccactccaaatccattgtggaattaaaggacagaaaagaagttcctgcaaaggaatggagcaagaacccggcaaaatacgtatgtcttcccgccattgccaagaacctgagagtgaagcttcaggaccgcatggccaagctggcagcctacagtgagacctccccctttaaccggatggaaatgggagacaccaaggtaggtgtcattgcctcaggggtgtgctattactacgccaaagaagtctttggagacaatgcttcctacctgaagctgggctttaccaatccccttcctgccaatctcatcaaggatttctgcagcaaggttgacaaggtttatatattagaagaaaacgatccctacattgaggaatttgtgaagatccagggcatctcctgcattggcaaggatctgttccctgcttatggagagatgactccggatgtggtccgtgcttgtctggaaggcaaaccaaacgagaccattgcttttgataagagcaagcttatcaaccgtgcccccaccttctgcgcaggctgtcctcacagaggcctgttctatcgtctgggcaagagaaaagacattatgatcagcggagacattggctgttatactctggcagcaggaaaaccctacagcgctatggactctacagtgtgtatgggagccagcatcagcctgggacacggcgcccagagagcttttcatgcagagggcgtgaacagaagagtagtaaccgttctgggtgattctaccttcttccatacagggatcaactctttgatcaacacagtgtataacaaaagcaataccgtaaatattattctggacaaccgtatcacaggaatgaccggccaccaggaaaatccgggaaccggatttaccgcaaagggagagcccaccaccttgatcaaaatcgaggatctggtgagggccatcggcatttcccatgtgtatgtgatcgaccccaacaacttaaagcaggtggatgagacgctggatacctgccttgccctggatgagccttctgtgatcatcaccagatggccctgtgtgctgaagaaattctcccaggcagacaaggaggagttcgacgctctgtttgcaaccaagaataaagtagatgaagagaagtgcattggctgtaaggcatgtctcaaagccggctgtccggccatgtcctatgacaaggataccaagaaggtacgcattaaccgggcatcctgcgtgggctgtgatgtgtgcacccaggtatgtcccaaagacgcaatcgtgaaggaggattaaggccatgacaaagagcattttattagtgggcgttggtggtcagggtaccatcctcgccagcaagatcctgactaccggtcttatggaggcaggatatgatgtgaaaatgagtgagatccacggaatgtcccagaggggcggaagtgtatcctcacaggtacgctatggggagaaggtaatgtccccggttattgaaaaaggaaaagcagatattatcgtagccttcgaaaaaatggaggccctgcgttacctggattacctgaagcaggagggaaccctggtggtaaataatgaagagatcccatccatgtccgtgatcacaggagaggaagattatcctgatgacgtgctggaggagattgagacccatgtgaaggcaaaggtggtaaacgccacagagcttgccaaagaactgggaaatgaaaaagcagccaacatgatccttcttggaaccattattaaatccatgggcctggaagccattgactgggaaagtattttaaaagcaaatattaagccacagttcctggaactgaactgtaaagcgttaaaggtgggaatggacgccatcacctgcatggcttagaaatcgaaaggagaataggtctgtgcaggaaagagaaaaatttggctcgcgcctgggattcattctggtatccgccggctgcgccattggtcttggaaatgtgtggaagtttccatacatggccggaagatacggtggagcggcatttatccttatgtatctggcattcctggtcattctgggactgcccatcctggtgtgcgagtttgcagtgggacgtgccagcagaaaaagtacggccaaggctttccatgagctggagcctaaaggagccaatttccacaacttcagctttatgagcatggcttccaactatatcctcatgatgttttataccatggtagccggatggatgatgtactattgcttccgtctgggcgccggagaattttccggggtgagcacccaggaggttgccgcaggctttgagaaaatgcaggcatctccgggactgatgaccggatggatggtcctggcagtggtcctggcctttggaatctgttccctgggtgtacaaaaaggactggaaaagatcaccaaggtgatgatgatctgccttctggctctgatcgtggttctggccgtgcgttccctgacgctggaaggagccgcccagggcgtaaagttctacttggttcccaatctggataccatgaaggaggtgggcatcggaaatatgattttcggcgccatgtcccaggcattttttaccttgagtatcggtgcaggatccatgaccatttttggaagttatctggacaaggagcgctcactggcaggagaatccctgcatatcactctgttggatacctttgtggccctgatggccggccttattgtgatcccggcctgctttgcctttggggtggagcctggggcaggtccggggcttgtgttcattgccctgcccaatgtgtttaaccagatggcaggaggaaggctgtggggctgtctgtttttcctgttcctgtccttcgccgccctgtcaacggtgatcgcagtgtttgagaacattctgtcctacggaatggatattttcggctggagcagaaagaaggcagtgaccatcaacctgatcggcatgatccttctgtccatgcctgcggttctgggctttaatgtgctgtcagggatccagcctctgggaccagggtccaacattatggatctggaggatttcattgtgtccaacaacatcctgccccttgggtccgtggtgtatgtgatgttctgtgtgtcccgctatggctggggctgggacaatttcctcaaggaggtaaacacaggagcaggcctgaaatttccaaaggggatccggccttatatgctgttcgtggttccgctggtgatcgtggtcatttatctgaagggctattacgataaattcgtcagtcagggcccggccgtgctggccgcatggatggtagtatccctggccgtgctggccttgatcgcatggtttattttcggcgggaaaagaaaaagacaaaagtaaatatggcacaaccttgcctgacgggttcagggaaggatgagatgcctggtaagataagaaacggccggagaatctccggctgtttccagatagaggaggaatatatatgatctcagaaaaaatgaaaccattggtgcagaacaattcagctatccgcatgatgtttgaagaaggaaaccgcctgcgtggcatttacggggcggataaggtctttgatttcagcctgggcaatccttccgtgcctgccccggagtgtgtgaaggaggccattattgacctggttaccaaggaggacccggtggtgcttcatgggtacatgaacaacgcaggctttgaggatgtgcgccagaccattgctcagtccctgaaccgccgtttcggcacttcctttgcagggaagaatctggtgatgacagtgggcgctgccagcggaatgaacgtgatcttaaagactatcctgaacccaggggaggaggtcattgtgtttgccccctatttcttggaatatggggcgtatgtgcgcaattatgacggaaagctggtggagatcgccccggatacagagaccttccagccgaatttagaggagctggagagtaagatcacccccaacacaaaggccgtgatcgtaaacactccccacaatcccacaggcgtggtctactcagaagaggttatcaaaaagctggctgccatcctggagaaaaagcaggaggaatacggcagcgtgatctacctgatctccgatgagccctacagagagctggcttatgacggggttcaggttccttacctgacaaaatattacagaaacaccgttgttggttattcctacagtaaatccctgtccctgcccggagagcgcatcggttatctggtgatcccggacgagcttgaggacagtgagaccgttctggctgccgcctccattgcaaaccgtgtcctgggctctgtaaacgccccttctctcatgcagaaggtcattgccaggtgtgtggacgcagaggtggatgtggcggcctatgacaagaacaggaaggctctgtatgaaggcctgactgcctgcggtttttcctgcgtaaagcctcagggagccttttacctttttgtgaaatctccggttcctgacgaaaaggcattctgcgaggcaggaaagaaatataatatccttatggttcccggaacctccttcgcctgcccaggatatgtgcgcctggcttattgtgtgtcttatgacaccatcatcaattctcttccgggatttcgcaagctggcagaggaatatggcatttgcccgtaattccccctggtgtgcctatgagctggattctttttcggaaatgtgaaaaattgtcggtgatctgggcaaaaataactttgacattttttatagagacaggtattatagaaaatatagaaataaaaagagaccaatgctgaatcagcaaaggtctctttttaagaagaatttaaaaaaagagaattagctggaaggaaggagctcttttataaagcgctccagtgcttccaattgagagggcgataactgctcgatggtatgaaagaactgagaatactttttctgaacctggatggaaggggggaggagtcctccgctcttcacctgactggtaatgtcagtgaacaggcagccacagtagccataatagggctggtagcattgtatccgcagatttttgttaacttcaggactatagtccacaacctcaagctgctttccatgaaaagccacctcggaaaaaggggccagccattttacctgggcgttggaaaatatatgaaaaaaggaattttccaccacctgctccaggggacgttcattcagctgtgcaagcgcctggttggcatagcggaaaatgaaatcaatggagcgtccttcttcatcctggatcagttcaaggaccgcaaaggcaatgggaagggtatttaagctttgaaattgttcaagaaaattaatgtcctcagcagcggtacgggtcttcggatggtgtgccagtctgcactggatatattccttatagccgtccaggagaaccttttccctgcgcttgctgtaagacagatgttcaccgtttagtaaatgcacctgcaggttgtcaatggagtagatagaagaatagtttacaatacaattcctgctgatccttataaattctgtggacggaagaagctgttcatattcagagagagttacaaacaaattgatgatcccccgtctttttaagtgaagatagcttaatttatctgaaatggtaatatagatgatgtcctccgtgggaatggtctcccaatggcggttaataagtagtttaattgtattcatatatcagactcctatcgcaggttatcattattttgatatatttgtgataaaccttgtaccttatggtacctaacaatattaatttaacatttatgaccagaactgtcaatattatgttggggaaaattgaccaaaatcgttgtttttacacgaaaaatgtagaaaatttcgcgtaacgaaccttttaagccaggatttccataagaaaggaggtgtcctgtggataccaatatgagacattatgagtttgtgtattggggaatcgtgacggaaatatatagaggaaagctgaaaaaaggagataccctgccggctttggcagaaatctgcggcacctaccaggttggaaggaatacggcccgttctgcagtgatgcttcttcaggaaaacggttatgtggaatgcgcacccagaaagaagcccctggtatgctttgactttgaaaatcctgcgtacagaaagctgtatttggaggaattgtgccagcggagaaggattgtggcccaggtgctggactttatgggggacattattccggggatcgtggttcatattctgaagatcagtacagaagaggaaaaggatcaggtgtgcaggtatctggaggaggcagccagaaatcttccggaggagtcagagacagaattgtccggcgtgcttatggatgtttatatgaaggcgatctcgctgggagggaaccagcttcttaaccggctttttatgtatttgttctataacatacaggttccggttacaacccaagaaagacacaatgccatttacaaggcggtggtccctgccatccgcaccatattgaagagaatggagaagcaggcacaggcagaggcctatggaccccttgctttggaaattacatttttcagccgtctcacctctaaaaacatcagtcattatttagaccgtattctccgggatattaaggagaaggaggagagaacatttcagtggcggccggcggtggaaggcagaacaatttatcttttgctggcttcagggattctggataagatcagcaagggaatctacagtaccggagactttcttccgtcttattctcagctggcagagcaggagggggtttcggaaaaaaccattcgaagcgccattgcctatttaaataaactgaacattgtttcttccataaacggcgtggggaccttagtgaaccctacggagaaatatgatgtggaaaccttcttccaggatggaatgcacagagggatttttaagacttattttgaggcgttacagctttttattatgatgcagcgtcctgtggtgctgctgggaatatccaaaatgagtgaaaaggagtaccgaaggctggaggaggcctccagggagccttattttaacgtgggtgatgtgctggaatttatggcagaggtcagtaattcggaggtggtgaaggagattttctgccagcttcgagaaatgcttaattgggggtacctccttgagctcttccacaggacacaggtgaaaggagagcgggaagctgtgaaaaacctggtgcgaatggccagagacgggaagggtgaccttctggctgatgagatttaccggatctacagacaggtgtttcacagtgaggcggagtttgtggggaaatacgggattgccgttgaactggacatttgagtctggataaagacctggctggattttttctaaaataacaagagacagggtccctgggggaaaacctgtctctttcctgtttttactggaaatcaatgatgtctgcctggcgcagaaggaattctttttcttcctcaacacctttggtgagctgtgcggcagctgcgatgggaatccatttctgtacgtactgcttggcagtatcgctttttttgcagaacagatccatgtacagatctgcctttttctggtccttcacagcgaattccagataggtgatggccgcatctgcgctggcgttgccgatggtggcatgggaccagtcaatgatggtgagagagccgtctggttttacgatcacgttggtgggattgtaatccccgtggcagagcttggtgtggtcaggcatagtgtccagacgggtgtgcagctcatagcgggtagttgcgctgagcgtctccttcaggctgctgatcttgcggcttaatttatccttcagcatggtgaggcggggggcagttttgctgtgcatgacaagctgcaggtccacaaactgctccatatacttctccagattggccgggtctttttccataagctcagccagggtctggccctccacatactcaatgaccagagcccactccccgtcaatttcattgacggagagaaccttcgggatatccaggccgctttcttctactctggcctggcagagtgcttcgttaaatacatttgcttttccgtgttctttggtgaaaacctttacaatatggtcaccatctttataaacaactttatatgggctagttgaaaatacttttttgccttttaaattcatggtagagtcccccttaccttagaaatggccacagccggatttatttggtttcattgccgtagtatgctttcagatacagatccttcagctcgcttatgagcggatatcttgggttggcgcctgtacactggtcgttaaaggcctgctcggtcatctcgtccagggtttccaggaaatatttctcatctacgccgtaatccttgatggttggcttgatctcaatgatcttcttaagctcttccagcttggcaatgaacttttcaaatacttcgtagtcatccttgccggaaagtcctacaaaacgtccgatctctgcatagcgggccagggtgtgcggatactgatactgcgggaaggttcccatcttggttggcacctcagcactattataacgcattacatctgttaacaccagagcgtttgcgattccgtgaggaatgtgatggaaggcacccagcttgtgagccagggagtggttgatccccaggaaagcgttggcaaatgccataccagccatacaggatgcgttggccatgtgatcacgggcttctacatcattaccgtctctgtatgcacggggcagatagtcaaataccagcttgatggcttttaaggcaaggctgtcagtataatcagaagccattacagatacataggcttcaattgcgtgagtcattacatcaataccggaagcacaggtaagaccttttggctgggtcatcatattgtcagtgtcaatgatagccatgttgggcatgagctcatagtctgccagaggccatttcacgcctgtatcctggtctgtgatgatggcaaaaggagtcacctcagaacctgtaccggaggaggtggggattgctacaaagtaagcttttttgcccattttcgggaaggtgtagattctcttgcggatatccatgaaatccatggccatgtcatcaaagtctgcatccgggttttcgtagagcacccacatgatctttccagcatccatggcagaaccgccgcccaaggcaatgatgcagtccggctcaaaagctttcatggctgcagcgcctgctttggcagaagccagggaggggtctggggccacatcaaagaagcaggtgtgcacaatgcccatggaatctaatttgtcttcaatgggtttggtgtttccatttttatagaggaagctgtcagttacgatgaagcagcgtttcttgcccatgacggttccaagctcatccagagcaacgggcatacagcctttcttaaagtaaaccttttcaggtgttctcatccagagcatgttctctctcctttcggcaacggtcttaatgttgatcaggtgcttaacgcccacgttctcagatacggagttgccgccccaggaaccacagcctaaggtaagagaaggtgttaatttaaagttgtacagatcaccgataccaccctgagaagacggggtatttacaagaatacggcaggtcttcatggcagcggcatgctttgccattttctctttttcattggtgttgatgtaaagagaggcggtatggccgtatccgccgtcagctaccagctgttctgccttggcaatggcctcatcaaaggtttgggctttgtacatggccagaaccggggagagcttttcatgggcaaattcctcggagatgtctacagattccacttctccgataaggatcttggtctcttcgggaacggtgactccagccatggctgcgatggtggcagctttctggcctacgatcttggcatttaacgcaccgttgatgagaatggtcttgcgcaccttctccagctcgtctggcttcaggaaatagcagcctctgtaggtaaattcgtcttttactgcctgataaaccttttccagcacagtcacggactgctcagaggcacagatcataccattgtcaaaggttttggaatgaatgatggagtttacggccagacgcacatcggcggtatcatcaatgatcaccggggtgttgccggcgcctacgcccagtgctggttttccggaggaataagctgcttttaccatgccggggccgccggttgccaggataatgtctgcttccttcataaccatgttggtgagctccaggctgggaacgtcgatccatccaataatgccttctggcgcgcctgctttgacagcggcttccagaacgaccttggctgcctcaatggtacatccttttgcacggggatgggggctgatgataatggcgtttctggtcttcagggcaatgagggtcttgaagatggccgtggaggtggggttggtggttgggataacggctgcgatcagtccaatgggctcggcgatcttcttaatgccgtatacgggatcctcctcaatgacaccgcaggtctttgtgttgcggtatgcattgtagatgtactcggcagcgtagtggtttttgatgaccttatcttccacaacacccattccggtttcctgcacagccattttggccagcgggatacgcattttgtcagcagcggtggcagcagccttgaaaattttgtctacctgttcctgtgtgtaggcagcgaataccttctgggcctgcttcattgacgccattttggcttccagtgcttctggagtgtcaatgatctgagggatgacagtttctttttttgccatgattggtacctcctgttgggattagaatatatttgttaattaattatcaatgtcattgaggctattatatgctcttgttaattatttgtcaatagaaaaaatgaaaatttgtcaattttttaacgactttatggattttttgcttttccagggaggagcaaaggtaaaaaagcgccccctcacagcagcctttgaataaaagccgctatgagaaggcgcagttcttaaagtttgtggtctgccggccaggtacaggtaaatgaaaggaacaagtaaatcacactggccagatggatattattgattgcggaaagcggagcgcttgcgttctcttgggtccaggatccgtttgcggatgcgcagagatttgggagtgacctccaaaagctcgtcccggtcaatgaactcaacggcctgctccaggctgagcaccttggggggagtcagcttcagggcctcgtctgcagaggaggaacgggtgttggtcaaatgcttggtcttgcacacgttcagctcaatatcttctgccttcccgttctggccgatgaccatgccgctatataccttttccccggcggcaatgaacagggtgccacgctcctgggcggagaacagaccataggtgacagcctccccggcttcgaaggcgatgagggagccctgcttccggtaggggaagtctcccttgaagggggcatatccgtcgaaaatggtgttcagcacaccggttcccttggtggaagtcagaaaatcaccccggaaaccgatcaggcctctggaggggatgtggaattccaggcggaccgtgccgtcgctggctgtgctcattccctgaagctcgcctttacgctcgctgagcttctggatcacggtgcctgaaaattcttccggcacatccacataagcaatctccatgggctctaattttttgcctcgttcatcggtgcgatagaggacctcgggcttgctcacggcaaactcgtagccttcccggcgcatgttctcaataagcacggagagatgaagctcccctcgtccggataccttaaagcattccgtggattcggtatcctccacacgaaggctcacgtctgtgtttaattctctgtacaggcggtcccgcagatgacgggaggtgatgtattttccttcctgtccggccagggggctgtcatttaccaggaaattcatggcaatggtgggctcggaaattttctgaaaggggatggactctggattgtctccgccgcacagggtatccccgatatgaatgtctgcaatgcctgagattgcaacaattgagccgacagttgcttcttttacttctattttatttaatccgtcaaattcgtacagcttgctgatttttacccgttgatgtttgtcaggatcatgatggttcagaagggtgatctcctggtttacagaaatggtgccgttttccacttcgcccacaccgatgcggcccacatattcattgtagtcaatggtgctgatcaggacctgggtgtctgcgtccgggtccccttccggagcaggaatatactttaagatggtttcgaacagaggagccatattttccggtgtgtctcccagatccaggacggcatggccggccttggcggaggcatacaggaaaggacagtcaagctgttcgtcagaggcctccaggtccatgagaagctccagcacctcgtcgatcacttcgtccggacgggcctccggtcggtcaattttgttgatgcacacgatcacatggagatccaggtccagggcctttctcagcacgaacttggtctggggcatggcaccttcaaaggcatccaccagcaggatcacaccgtccaccatctttaggacacgttctacctcgccgccaaagtcggcatggccgggggtatcaatgatgttaatttttgttcccttgtaatgaaccgccgtatttttggataaaatggtaataccacgttcccgctcaatgtcgttggagtccatgacacggtcctggagctcctggttttcacggaatacgccgctttgtcgaagaagctggtccaccagagtggttttgccatggtcaacgtgggcgatgatggctacattgcgaacatcctcgcgtttgattttcatatatttcaatcctttctttattaaatgggaattttatcagcatgtctcgaagccttagtttaccacattttcgggagattacaaggtgcagagaaagattttttgaaaaaattttcaacttccggttctaaaagtggacatcctctcataaacatagtatagacaagacacccaaagaggaaggagaactactattatggcagataaaattattgaaaacaaccaggtatctatgatggggaaaattgcaacagatttcaccttcagccaccaggtcttcggagagggcttttataccatggacctgatcattaaaaggctcagcgattccgaggacaggattccagtaatggtgtcggagcggcttattgatgtgacccaggattatattggggagtacattgagattcacggtcagttccgttcctataaccgtcatgaggagaagcacaaccgtctggtgctttctgttttcgtgcgggagctgcgctttgtggaggaggatgacgaaaatgtcctggtaaaccagatcttcctggacggttacatatgcaagcctccagtgtaccggaagacccccctgggcagggagatcgcggacttgcttctggcagtgaacaggccctacggaaaatcagactacataccctgcatctgctggggcagaaatgcccgctatgcctctgcttttaccgtgggaggccatgtgctcatatggggccgtattcaaagccgggaatatgtgaaaaagatcggtgagaatgagacagagaagcgcatcgcctatgaggtatctgtgagcaagctggaatatttagagtgattggaagattgtggatacccgggtcttgcaatttagtccagattagagtaagataaagaaaatcacgggggtatgcctttgtgaagaaaaaagtaatgcacatgtttcataaagtacaagaggaatgaatatggaaaaaggattaacggaagtatactgtggaaacggcagaggaaagacaacattggcaataggacagggccttcgcgcttgtacacagggaaaaagcgtcattattattcaattcttgaagggaaaagagaagcgggcattggattttttggaggatttggacggtctggatattaagatcttccgctttgagaagcaggatgcctgttatgagcacctgagcgagagagagcaggaggaggagcgcaccaatattctcaacggactgaattttgccaggaaggttgtggctacccaggagtgtgattttctgatcttggatgaaatactgggactgatcgagtatgggatcaccaccggtgaagagatcatcaagcttttgaatatgaaagatccggagatgcagattgttctcacagggcgttacatgccccaggagttcaagcctgtggtggacagtgtgacgattttggagactacggactatacggaaaattaaataagaaatcaggaaggggtgtgccgggcggcgcaccccttcctgattttcttagatatatttttcaagaacagccttcacagctcccggtccggcagtcatttctgtaaagtatctgcatacaaggggcgcaaggccggcttcgcacagatcgatcccgaagattgccttatttctcagaaggggctccagcagcggctgggcatccacagtcccgtccaggggcacggaggccacataggggcatacggtctgaagaagcgggtcagggcttaaggtaaaggcatttccgttgtcatccactgccataagatagcgcagccatcctgccagcacgagcgggattgccttcaggtctgcaatatccagatccggtgattttgcataggccttgatggtctccccgaaacggatggccagcttctgtgaggtgtctgtggcaatacgctggggggtgtctggcataaagggattggggatacgcacattcagcacagtgtcaataaattccttggggtccaggattcccggattgaccacaacaggaagtccttctttgtatccaatctgttccgtaagcctgcgcaggagaggattcttcatttcttcagagatgaggctgtagtccagcagacagccaaagacagccagggctgtgtgcagagggttcaggcaggtacaaaccttcattttttctaccttgtcaacagtctctctgtctgtgaagatcaaaccgccttcttccagagccggccggccgtttggaaaattgtcctcaataacaaggtactcacattcctctgcatttacaaagggggccacataagtatttttgctggtgatcactggctccagatcctccacctgatcctgcgcaaggatctttttcactgagtcatcggggcggggggtgatcttgtcgatcattgtccaggggaaggagactttgcctgaatcacacacgtaagcggcaaatcccggctgggtgagtccgcttttttcccactgagaggcaaaggcagaaattgcagcgtaaagcttgtccccgttgtgggagcagttgtccatgcttaccattgccaggggaagctggcccttcaaaaatctggtgtaaagcagggcagctacttttccgatatagctctcgggcttttcagggccgttttccatgtctcgggacacggctgggagatagtcccctttgctgtctttgagactgtagcccttctctgtgatggtgaagctggccatttgaagagagggattagagaaaatctccttcaggctgccaaattctgtttggtcctgggaatccaggatgagggactgcataacacttcccacaacggttttctccacagagccgtctgactttaaggtcaccagaatactgtagttttcgtgggggcggttcatcttctggatgatctcataatcaaagccctctgccacaatgagtccccggtccagtacttttttgttcagcagttcctgtaccacattggcctgaaaggcccggaagatgttgcctgctccgaaatgtatccagaatggattcttctttgtgtttttggcgatcacttcccggtcatattgggggaggtgatagccggctgcctcccattgttctgtctgttttaatccttgtgtgtttaacttcatattatctttctcctttctcgctggcttactgccgcacgtttccataagtcctgccaggtgttctgtcataagctgtctattattataaacctcccaggaaaaaatccaattggctggattgcttcgtacattgcaaaagttgcggttcggtgatatgatagcagtagaaatacgtatggagacatagaaaaaaggagtgggcacatgaagaaaaacctgcagaccacattcagcaccaggcagtatatgttgtccgaagattttgaggtctattattataatgaacattacagcacctcggtgaagagccacacccatgattattatgagttttatttttttattgaaggacatatgtcctatgagatccaggggaagatgtatcctctcagctatggagatgtggtccttgttccgccgggaacccttcaccacgcagttgcccgggacaaggaggtgccgtaccggcggtttgtgttctggatcagcagagactatgtaagccagctcctggagctgtccccggcctacggatacctgctccagtatacccagcagaagggagagtacatctttcataatgaccggatcacctttaattctatccagacgaaggtgcttcatcttttggaggagacacattccggaaggtttggaagggaggccaggatccagctgtgcgtgggtgacctggtgctgtatctgaaccgtgtggtatatgagagaaatcattcagggaagaagagggaggaggggagtctgtttgagaatctcaccgactatattgaagaccatctggaggaggagctgtccctgaaccagcttgcagaagcgttctatgtgagcaaatattatattgcccatatgtttaaagagcagataggactttctgtacaccagtacattaccaagaagcgggtggcggcctgccgggatgctatacgaaaccatgtaaagatcagcaaggcctatcttatgtttggatttaaggactactcaagcttctaccgggcgttcagaaaggaatacggaatgtctcccaaagaatatgaacaggcgggaatttcagatttttataagtgagcaggaatccgttttttcgttgacaagaaggtgtaatgatgttatatttaaaaaaatacatatatacagaacaaaataggtagaggttgcgtttttcaagagtatactgccggatatgccaggcatagaagaagacagtggaaagggaacaacgccgaaagaatatctttcctgaggggatatttcttgggcatgcagtgaataactgtatgactgtcatcgaaagatggggagctatctaaagaatatttatatagtgttatattctttagaggccggtctttagagaccgcctttttcatttcccggataggtccggccctttttaagcggccattatggaagatacaccagctatgggcaatgatggggaggattaagtgcaacaagggaatctgttgaaaagataaggaggaaaatggtatgtcaatttttaaaggtgcaggtgtggcgatagcaactcctatgaaggaaaacggagaagtgaattatgagaagctggatgaacttctggagttccagatcgccaatcatacagatgcgattattatttgcggtacaaccggcgaatcttcaaccatgtcccatggagaacatctcaagacgatcaagtttgccatcgaccgtgtgaataagaggattccggtgatcgcaggaactgggtccaattgtacagagaccgcggtcatgatgtcaaaagaggcacagagctacggagcggacgctgttcttgtggtaactccttattacaacaaggcaacccagggaggactcatcgcccactatacagccatagcccaggagatcaagaaaacccctattattatgtataatgtgcccagccgcacaggctgcaacataaccccggataccacagcgtatttagtgaagaacgtggaaaatattgtaggtctcaaggcggccagcggagatctttcccagatcgccaagaccatgaacctatgtgacggcaggctggagctctactccggaaatgatgaccagatccttcccattctttctctgggcggactgggtgtgatctctgtgctgtccaacatcgctccccaggagacccatgacatggttatgaagttcatggagggtgatctgaagggcgctgcggatcttcagcttcgcgccattcctttgatcagtgcgctgttctgtgaagtgaatcccattccagtgaaggctgccctgaatatgatgggcttccaggcaggccctctgcgtcttccactcactgagatgacagatgccaacaaggagaagctggcaaaggctatgaaggatttcggactgaagctggcataacacagaaggagataagatatggttaggatcattatgcatggctgctgcggacatatgggtcaggtgatcaccgatttggtggagaaggacccggctgcccagatcgtggcaggaattgatattatggataacggaaaatattcgtatccggtatacaccaatatagaggactgtcaggttgaggcagacgctattattgatttttccagcgcaaaggcggtggatgctcttctggcctacagtgtgcgccggcagattccggttgtggtctgtaccaccggattaagccaggaacagcttgaagcagtggaagaggccgccaggaaggtggctgtgttaagatcagccaacatgtccctgggaatcaatacacttttgaaattggtgcaggatgcggccaaggtgctggctaaggctggatttgacatggagatcgtggagcgccaccataatctgaaggtggatgcacccagcggcacggctctggctctggcagacagcctcaatgaggccatggaccagcagtatcattacatctacgaccgcagccagaaaagagagaaaagagatgccagggagatcggtatttctgcagtgcggggcggctccattgtaggagaacatgaggtgattttcgcaggtcctgacgaggtgatcgagtttaagcacaccgcttactccaaggctgtgtttgggaagggcgccgtggaggcggccaaattcctggcaggtaagcctgcaggaagatatgacatgagtcatgtgatcaatggttaaataaaataaaaaatgaaataaaaaaatccagaaaaatccatccggttgttttcccgccgggtggattttttttatgaatctccatggtgttttccagtgtataaaaagtgagaatccgcacatattactaacataaatgaaatttaaacttaaagaaaaggagattgaggaaatgaaaaaaaccaggcagatagtaatggcaggacttcttgctctcaccctgtgtatggcagtgggctgcggagatgacaacaacaccaaagacagcaagggcggcagcgcatctacggaaaacaccacagacaacaacgaggcagataaaaacagtaatacagataatagcgatacagataataaggataagaaagacaaggatacagataccggaaaagcagacagctctcctacagtggtgccggaccgggataccacaggaaccacagatgatacccaggacggcggtttagaggcccaggacgatgcagatgaagacggtgtggcagattatgcaggggacaccatgggtgacaatggaacggatgacggaagcgttgcttctgacttaggagactctgtgcgtgatgtgggcgacggagttggcaatgcagtggaagatgtgggagacgcagtgggtgacgtggtagacggcagataggcagaagagagggtgcacaaggagcgccctctttttgtataggccaaagccttgggagaattgaaaggccatagggtgcagcgcaagcctttttcttaagaagtcctctgggggttttaaaaatggattgcggcctggggagagaacctgtataatagcaaaaaaggaaagacagatgtaacccagtcaattgcagaaaccatggaggaaacttatgaaatttcggccctgtattgatattcataacggcaaggtaaagcagatcgtgggcgccagtctcattgaccagggagaccaggcccgggaaaattttgtgtcagaacaggatggggcgttttacgcgtccttatataaagaagccggcctgatgggcgggcatgtgatccttctcaacagtgtggaatctccctattatgaggctaccagacagcaggctttgctggcactgagagcctatccccagggacttcaggccgggggcggcatccggccggagacggcctgggattatctggacgctggagccagccacgtgatcgtcacctcctatgtgttccgtgacggaaggatctcctatgagaacctgggaaaaatggtggacacagtggggagagaacgccttgttctggatctgagctgcagaaaaaaggatggaagctattatgtggtcacagaccggtggcagaagttcacagatgtggaggtcaccctggagcttctggaggagctgggggactgctgtgatgaatttcttgtccatgcggtggatgtggaggggaaggccagaggcgtggagacggagttggcagaccttctgagcagctatgagaagcggccggtgacctatgccgggggagtgggaagtctggaggatctggaggctttgcgcttccacggcaagggccgtctggatgtgactgtgggcagcgctctggacatctttggagggggaattcccttccgtctggtaaagagcttgtaaaatcccgcatttacggaatttatttgagaaagtaaaaataattaacaagaattctgtaaaagactattaaaaacccaattaatatgatataatatcactaactcgaaattctgttttcgtgttaaatattggtaaaggggatggaaatatgaattttatcataagcggtaagaacattgcagtgacggatggtcttaggactgccgtagaagacaagctgggaaagctggaaaggtatttcactcctgaaacggaagttattgtaaccttaagtgtggaaaaagaaagacaaaaaatcgaagttaccattccggtgaaaggcaacattatccgctccgagcaggtgagcaatgatatgtatgtatccattgacctggtagaggaagttatcgagcggcagcttcgcagatacaaaaataaaattgtagacaaagaaaagtccggaggaaacttccagcaggcatttattgaaaaagattatgatgaagaagacgaagtaagaattatccgaaccaagaaattcggaatcaagcctatgtatcccgaggatgcctgtgtgcagatggagcttttgggacataatttctttgttttctataatgcagagacagatcaggtgaatgtggtttataagaggaaaggaaatacttacgggttgattgaaccggaatattaagtaaaaccggaacttagaacaagacagggattccggcggagaggtacatccgccggaatccctttattattacatgggaaagttctctgcacaaagctgccaagccactcacgagtgaggggatggggagttgaagcgggcttgctccctttattattacattaggaaagtaaaacacaggaggacacagcattgaagagaaattcaggaatcattgcagccctggccgtggtactgttgatcggagctggctgcggagcggccttgcagaccatacggctgaaccgggccatggagagagaaagtgacaagctggatcaactgctggaacgcacggcgacccaggaggaagcagcagatacaaagccttccggctcattaaggctgacggtaaacggcatgaatgtaaccattaatctggaaaagacaggttcttcctatgactgtcccaccttaaatacggagtttgacacagtgatccaggttggaggacagggaacccatgagatctatgtggccaaccaggaaatgatggagggcagcgtatctgtccggccagaggttttggcaaaggatgaactgatccatctttccattgacggtcagaactattttctgcgcacccttcccgaagattttccccagcttaccgtccaggggcaaagtcccaccggcggattttactacaccactttggacaactatgtggtgaaatttaatgcccagggccaggtggttttctatagaaacgcggatgcaaagaacgcgggccccttccgccgcaatgatatagacggccagatcatctattcctatctggaagcagtgggaagtaccaggcacacgcccctggcaaaggtgggctatcgccagacaaagctggtacttttggatgaacagtataataaaattgacgaagtcccctatctgtgccagtcagataagattccagaggaatatcctttggagaatcatgaataccagattttaggcaaggatcattatattttcaccacttacctgggaaaacgagtggataacattcctatggagctggagggcagcagctttggagcgaacgtagctgcctgtatcatacaggaggtgcagaacggagaatgcgttttccagtgggacagcacggattatccagaactgtacggtctgagcagggaggcgggggattacacgaatttcacccgcatgtggtcagattatgcccatatgaatgctgtggtggtggaccctgcagatggaaatctggtgtgctccatccggaactttgacagtattatcaaaatcagcaggcagacaggggagatcctgtggatgctgggaggaaatgaagacagcttcggactgactccggagcagcagtttaagcggcagcacaatgtgaccattttggaggacggctcctacctgctctttgacaacggctgtacggtaaatgtcctggagtatccggcccagacagaggaggagctggagaatgcagatctccaggagtccagggtcctgcgtttctacctggatgaagaaaacctgcaggtgacagactggaaggagtacaagcacgatgggtatttttctgctaccatgggctccgctcaggtggtggatgacgcctcggatacacttctcattggctggggtggaaagtccagggagggaatgcccctttttgaggagaccaatttcaaagatcaggtggtgaattttgaagtgctctgtgccgatgcctccgtcaactgttaccgggtaacgaaatatgaaaactgaccttttatggcctggttgtacattaaaagttcaataattattcattgtttttacagaaagaaagtgttagaatggactagtgtaccatcaggagaagatagaatggtgccagtgaaacttttattataaagatcttatgaaaatctgcatgattgctgccagaggcagtgaaggatatgtaagtgatttgaaagaaaaacgattggagttatcaacatgaatgcattttcaaaaatatttggaacccacagcgagcgtgaagtaaagcgtatcatgccgctggttaagaaaactgaggatttccgtcctgaaatgcagaagctttccgatgaggagcttcggggtaagaccagagagttcaagaaccggctggaaaatggcgagaccctggatgaccttcttccagaagcctatgccactgtgagagaagctgccaaacgagttctgggcatggagcattatcaggtacagatcatcggcggtatcattctccaccagggacgaatcgctgagatgaaaaccggtgaaggtaaaaccttggtttccactctgcctgcctatttaaatgcactggaaggcaagggcgtccatattgttactgtcaacgactacctggctcaccgtgatgcggagtggatgggtaaggtacatgaatttctgggtctaaccgtgggttgtgtgctgaatgacatgaagcccgatgagagacgtgcggcctatggctgtgacattacctatgttacaaacaacgaattgggatttgattaccttcgtgacaacatggtgatctataaagagcagcttgtgcagagagacctgcactactgtatcatcgatgaggtggactctgttcttatcgacgaagcccgtaccccattgatcatttccggacagagcggaaaatccaccaagctctatgaggtctgtgacattctggcacagcagctggagcggggcgaggccagcggtgaggtcacgaagatgacggccatcatgggcgaggagatcatcgagaccggtgactttatcgtcaacgagaaggataaaatcgtgaacctgacggagcagggcattcacaaggttgagaaattcttcaacattgagaacctggctgatccggagaatctggagatccagcacaacatcattctggctctgcgtgcccacaacctgatgcaccgtgaccaggattatgtggtgaaagatgatgaagtattgatcgtagacgagtttaccggacgtattatgccaggacgccgttactctgacggtctgcaccaggccattgaggcaaaagagaaagtgaaggtaaaacgcgagagcaagactctggcaaccattaccttccagaacttctttaacaaatataagaagaaaggcggtatgaccggtaccgcacttactgaggaaaaggaattccgtgatatttacggcatggacgttgtggaaatccccactaacatgcctgtccagcgtaaggatctggacgatgctgtatatatgacaaagaaggagaaattcctcgcagttgtggaatctgtgaaggaagcccacgcaaaacagcagccagttctggtaggtaccatcaccattgaaacctctgagctgttgagcagaatgctgaagcgggagggaattccccacaatgtattaaatgccaagttccatgagctggaggctgagattgtagcccaggccggacaggcaggagctgtgaccattgccaccaacatggctggccgtggtacagacattaaactggacgatgtggcaaaggcagccggtggtctgaaaatcatcggtacagagcgtcatgagtctagacgtattgacaatcagctgcgcggacgttccggacgtcagggagacccgggagaatcccgtttctacatttccctggaagatgatctcatgcgtctgtttggttccgaacgtcttatgaaggtgtttacctccctgggagttgccgagaatgagcagatcgaacataagatgctttccagcgccatccagagggcacaggaaaagattgagttcaacaacttcggtatccgtaaaaacctgctggattatgaccaggtgaacaatgaacagcgtgaaattatctacaaagagagacgccaggttctggacggagaaaacatgcgggatgcgattttcagcatgatcacggatattgtagacaatacggtagatatgtgcttcagcgatgatgtggattctgaagagtgggatctgaaagaactgaacaccactctgcttcccattattcctctccacgccctcactcctgagaaggtaaagggcaaaaagagaaatgaggtgaaacaggagctgaaggaagaagctgtgaagctctatgagaccaaagaggcagagttcccggaaccagagcagattcgtgagctggagcgtgtggttcttctgaaggtgatcgacagcaaatggatggatcacattgatgatatggagcagctccgtcagggtatcggacttgctgcctacggccagcgtgatccggtagtagaatataagatgagtgcttatgaaatgtttaataacatgacaaacgccattcaggaggatacggttcgtatgctgtatcacgttcatgtggagcagaaggttgagcgtgagcaggtggccaaagtaaccggaaccaacaaggatgacaccgcacccaagaaatctgtgaaaagggcggaacagaagatttatcccaacgatccctgcccttgtggaagcggaaagaaatacaaacagtgctgcggccggaagcaggctaaagcttaagcattgtgtatctgggtatgacagaaaggccgtcacggtggttgtgacggcctttcttaactctccgggggatgcacaaagctgccaagcccttcatgagtgaggggaaggaaagctgaagcaggcttgcccgccttggtgcacactggacttattcttgcgaaaatggagtatttctgttataattgttgtcaaatccgtgaatttgacagagacaggaaaaactttagattatagagaaacctaggaggaagagcatgaaaaaacacaaagcagccgctttgcttggcacagcacttttgacagtggggatactgggagcaacaggcccggcagtttatggcgcccaggaaggattccaggcagagagtggagggcttttttcggaagcacagagtgtatttgatgaagaggatcaggcggagatagaagctcctcaggcaccggccccccagtggagcccacagcaggaagtgcccagaaaggtgtaccggagtgtggagggacaggttcctgatgaaagcggaatcttttcagacggaggtcagacacaggtgtataccctcagccatgagaatattttgaaggagggcagcttcggttctgggaaaataccggacagcgtagaccctaagctggagcaggctgtcctggagggagtgaaggcagagaagtcttacctggatctcactgcgttccagatccctcaggaagaaatagacggcatcgtcagctggatattaaatgagaatccctctttgtttgatgtacggtttgagatgtgccatttggcacaggggaaagtcacgattctttatgtagactatgaaaaggatgagcagaccagaaaagaacgtcaggaaaaataccaggctgctctttcccaggtccttaaccagatcagtccaaatctgacggactatgataaggtgaaagcggtccatgattatttagtggagaacctgcagtatgaccaagagggtgtggactccaatacctattccatggatgcctttcatgcctatggggttctggttgataaaaaaggagtgtgccagggatatacccaggccatgaaggctctcatggacagcctttccattccctgccgggtccttgtgagcagtgatatgagccatacctggaaccaggtgaagctgggagattcttggtatcatgtggatgttacctgggatgacccggtgccggacgtgccgggacaggtgaaatatgagtatttccttttaagcgatgaaactatccgggacaaaggacatacaggatggacgtctccttatgaagcagattctaaaaagtatgagacacaggaagaaaatacaccagaagcagcccagactccggatatggaaaataacgaagatcttcagtgatcaggatgaacagctctttctgataaaagacgagattaaagtcttttatcaggaggagctttttttctttaggcaggaaagttgtgggaggcagcacaaagaaggaggcctgaagaaaattatgaaggaataacagggggaattgtcacataggaatagagttatcaaagaatattcgtaaaatggccgtatttgcaggagacctggcagagggatttttgaaatagggctctttacgaatgctttgggaagcgcagccaggatcctgtgtgcggacaacccgggaaaatgcacagagggtccgttgacaataaaagtatgggaggagcaattaagaatgagaagatggaaaaagggacagaaaaaaatcagcagcagaaatatggaccagaggaaacgagcagttataacaatagaacccgaaaatgaaaactccccacagaacataaaacaggaaaacggacaaaccatacagaatatagaacaggaaagcggacaaaccacccagaatatagaacaggaaagcggacaaaccatacagaatatagaacgggaaagtatgcaggccacccagaatataaaacaggaaaacggacaaaccacccagaatatagaacgggaaagtatgcaggccacccagaatataaaacaggaaagtggacaaaccatacagaatataaaaaaggaaagtggacaaaccacccagaatatagaacaggaaagcgcacaaactacccagaatatagaacagaaaattggacgtgcctcacagaacatggaagcggaatatgagcagagtatagagaaaatagaacagggatatgggggagaagaaatgaatgcagaaaatagaaatgagacaagggctgtacaggaatgtaaaatttattatatgaccggaaaggaaggacgtcggaagagaagggcagggagatcatacagcgtgaaagcagacctgcgggccagagcaataaaagaatgtatggcagggcgggtacagttggcaaagcaaatcccatttcctgtaaattacagggaaaacaatagggtgagcatagaacagtgcaaaaattatagggcgggccggcagcctgtgaagattgaggaactgaccaatataattttaaattacagaaaagtcagcgggctgaatatagaacagggcaagcttccctattctgtcctggattacagcagtacaaatagtcagagcatggtgcagggcctgctgccgggaaaccgggtgagtctcttccctgttttacgggaatatgaggagtacaccaatgaaagcagcagaaacttcccctgtattgtggatcaggcccaaaagggccgggaggagatcaactgcatcacaatgggccggaacaaactacccaggtggaggaagctccggtaccggctgggcggtatccaggcgtttatgggcaatttgaaaaaatggaagtccctgtggaaaaaaataaccaggagcagacacaaaagtcaaaaaaacaggaccgttcaaaaccgaatacaggtttatggagaatttttgtccatacccaaatatggaagagtgctgaaacatcacaaaaatttttgcgagatcctgtgatccttcctgtctgtgaacctgttttggaatcagcacagggacagtagcgccaggacgccggataaggtataatgaatctggtaccgtgaagtctcaaaaacaaggaaaaaaacagaaaaaacataaatacagcgctgggaccacagctaaggtttccctgcgccaacaatggaggaatcgattatgatatataccgtgacatttaatccatccctggattacattgtggatgtgaaggattttaaattgggaatgaccaaccggacagcatctgagcagatgtttcccggagggaagggaatcaatgtgtccattgttctgagcagcctgggaattgccagtacagctcttgggtttattgcaggcttcaccgggaaggagatcgcacaaagagtccgggataggaaggtttcctcggattttatccaggtggagcagggattttccagaattaatgtgaagctgagatccatagacggaacggaaataaatggagcaggaccggtgatcagcccggacaaggtgcaggagctgatgaaccggctggacagactcacaggagcggatacgctggtactggccggcagtatcccctcctccatgccggcctccatctacatggatattctgcggcagcttgagggcagagggatccaatatgtggtagatgccacaggggacctgttgctcaatgtgctgccctatcatccgtttttgatcaagcccaatcatcatgagctgggagaactatttggcgtcaccatcacaagcagggagcaggttcctccctatgccagaaaactgcaggaaaagggtgccaggaacgtgctggtatccatggggggccagggtgcggtcctccttgcagaaaacggccaagtgctggaacgccctgctcccaagggaaacttagtgaacgctgtgggcgcaggagattccatggttgcaggatttttgaccggatggatggaaaaaaaggattatgaacatgcctttaaaatgggtctgagtgcgggaagtgccagcgcattttcggaaaaactggctgagagagcccaggtggaggaaatctacagacaactgggttagagtgaaggagagtgggtaaatgagaatcgtggatttgctggacaagcgaagtattgatatcaacggtacgcccaaaaacaaaagcgaagccttggaccaaatggtagatttgatgtgggacagcggaaagatcaaggacaaggaagcctaccgcagacaagttcttcaaagggaagaggaaagcaccacaggagtaggagagggcattgcaatacctcacggtaagggtggctgtgtcaacaggcccggtctggcagccatggtaatcagagggggagtggattttgattccctggatggacagccggtccatctgatctttctcatagcagccccaaatacaaaggacaacgtgcatctggatgtgctcagcaagctgtcggttctgcttatgaaccaggattttgtggaaaagctgacccatgcctccagtgtggacgaatttttaaagattgtggatgatacggatcaggaagagccggatctggaggaaaaacaaccggcctccccccagacggctgagtcccccaagatgaaaatcctggcagtgactgcctgtcccacagggatcgctcatacgtacatggctgccgagggaattgaaaaggcggccagagcccggggaatccaggtgaaggtggagaccagaggctccggaggagcgaaaaatgtacttacagaccaggagatccgggaagcggactgcattatcgtggctgcggatacccaagtgcccatggaccgcttccatgggaaaaagctgattcaggtccaggtatctgacggcatcagcaaggcagaggcccttttggaccaggccataggcggaaatgttcctgtgtatcaggcctctcagggagaaccggcggggcagaagcaggcaggaggctccagaggccatcagatctatatgcagcttatgaatggggtttctcatatgcttccctttgtggtaggagggggaatcctcattgcgctggcgtttctcattgacggtttttctgttgacatgaatgctctgactccggaagccagggcagagtttggaaccatcacaccggcggctgctgcccttaagggaatcggcggcgctgcctttggatttatgctcccggtgctggcaggctttatcgccatgagcattggggacaggcccggtctggctttgggatttgtgggaggcgccattgcagccaatggcaaatctggttttctgggtgcccttctggcaggctttctggcaggctataccattgttgtcctgcgcagactctttgaaaagctgcccagggctattgaaaagatagcccctgttctactatatcccctgtgtgggatccttatcgtgggattgatcatgacttatttggtggaaccgcccatcggcgcactgaatacagccttgaatactgctctcaccaatctggggggaggcagcaagatacttctgggaataattgtggcggggatgatgtccattgatatgggcggtccctttaacaaggcggcttatgtattcggcaccgcgtccattgcggcgggaaattatgatattatggcagcagttatgattggaggtatggtacccccgtgtgccattgctcttgccaccctgctctttaaaaatagattcacaaaggaagagagagaatccggccccaccaattttattatggggctggcatttatcacggaaggcgctatcccttatgcggcttcggaccctctgcgggtgctgccggcctgtatcgtcgggtctgccgccgccggggccctgtccatggcctttggctgtaccttaatggcgccccacggggggatttttgtctttcctgtggtagagcatgccctttattatctggcttccttagtggcaggcactgcggtgggcgcagccctgctgggggccttaaaaagaaacgtttcataaagttcatcctgcaggttgaagcttcagaaccagcggctgtccggttatccgggcagccgtttgttgttacttcggaaagttcgctgaccttcccatgtaacaaaaagcctccagttttacttgaacctgcttttctagttgtctcacaggggaaaatcagatataataaaataaaaaatcaagggggatacttgaatgaagaaggtgaaggttcttttggcggccgctgggtgtgtgtgtacccttcttgcggcacagactgttttcgccacacagacaaaaagctctctctctgaaaatttatatgatttccagatagaaatagacgggataaagtaccagttccctatgccctatcaggagtttgtatctgctggagactgggagctgagcagttattatgacccggacattaaggtgaaatccaactcctatgcaatggtaggatttgagtccaaagatgccaggatcacggcatatgtctttaacgtgggcattaatgaatgtggacttgaggactgccttatgggcggtatacaggtgaagggctctgaatttgatctgaatctggagacccatacggttgagctatccaaaggaatcacccttgggacctccacggcagaggatattcagcaggcctacggacagccaagcgatacctaccagggggacctgtataataagctcagctatgagaaggatatttaccagagtatagacctgtatgtatataaggatgacggcaccttgaaggaagttcagatggaaaatctggtgaagccggataattttgacgtgggtacggtgagcacagaggttccggacattgtgacagattatcaggcaccggaagctttaggggaggacatgctggaccctgtggttgaatattgcaaagacttgtatcagcttccctgtcccttgagtgaatttgtaaaaaatggctgggagatccaggatctggaggaaggggattatctggctgggggagacattggcttctacgcactttccagagacaaccagaacatccgtgtagctgcctacaatctcacagagaatgccactgctgtggaaaactgctttgtgaaagagctggcctacgctgcctatgacaacgaagcactgaaaatgaccatctccgggaatataactgtgggagtgtccaaggaagaggttctgcgtctggcagatgagaaggggtatgtgatcgaaaatgacgatgaagagaaatcctcccagtatatccgggtctgccgcacagattccgagaagctggaccgctatgtggaatattggatcaacaagtcagaagatccggacacggtggcttcggtgacctatcacaatgaattaatggagtagcagccagagattctcaaggatccagttgcccataatgagaacaaccgccccgtagagatagccagtgcgaaatctcattcctatggggagacggccctttgatacatattccactgtgttggagaacaaaaaccacaggagcacacaggcgctatagggaactgccggataatagagaaaggactggacgggttgtccgtttaacagggccaggatggctctggtgcccttacagccaggacaatagaagccggtgcaggcaaaaaacaggcagggagccccggacagaagacggggcgcaagggcagcaaagacaaggactgctgccagacaggtccatgccagaagatagaaggttttttgcaggtctttctccattacgtgatctccttggaaataaggtgagttttcccgcgcctgtcaggcacagagcctaaggctgggtgaagctgctcttattttatagcaggggaaaaggaaagtaaagatacaaagcaatctcaatggtacgaaaacaatgattcatcaaatagaaatggagcttagaacagcatgaagtacacaaacagagactacaagacaatggccagggatgcactccaggggaattacggggcgccggtggcagccatcattctggtgaacctggggacaatggccattaattccatcacctcttatctctttcggggaagcggggtcatgaccattgtgatctctcagatttttgcctttggcattaccctgatcatggatatatttttggcaggacttacgaaaatgtatctggaaatatccagatatcagaagttttccatgggagatctcctgcattttttccaaaacaacccagaccgggtgatcgtggcgggttttttcctgggactgatcagagaagtcacttccatccctgtctactgggtgaattatggagttccccttgcagatgacagtggggatgccctcatgaactggcttatgcttttgagtggagccatgctggtacagcttgttctggaactgttgctcactctgccctttgtgatgacctacctgcttttgtgtgacagggacgatctgtccggtatggaggctttgcgggagagtggaaggatcatgaaaggagcaaagggaaaatatttattattgctggtaagctttcttccctttttccttatctgtgccatcacctgctacattgcagtcttgtgggttctgccctatttaaatgtggcggaatgcttcttttaccgggatttgaccggcgagctgggctttcatccagaaccgccttcagatgggcctatggacaacaggccggggctgaaggacgatcacttccagggcatgtaaaaggatctaaaattggcaggatctggccgttgtgtctcctcagccgtctattttcgcagtgagaacttttaagcccagagcaatgtaaataatcccggcagctttgttggagatggaggaaattctggggcttttgttgagaagtcctgagagcatggaggagacagaggcgatgagaaggcaccacagggtgcttgtaaaggtgaaggtaagccctaaaagtaaaaaagggagcataccataggtgtttttccctgacacaaactgaggcagcagggccaggaagaacagggccaccttggggttcagcacattggtaaggattccctggcagtaaactctgcccatttgctccccggacacactgctttccccggaaaaaagagaatccttgctgagaatggtacggatgcccatgatcaccagataggcggagcctgccagcttcaccaggttaaaggcagcggcagacttggccaggataatggaaagccccagggaggcgaaaaaggtgtgcaccaggattccggtggagattccaagggctgaggcaatgcctttttttctgcctccggtggcagatttacttaaaatatatatggtgtcagatccaggtgtcatattcagcaggatggaggaaaacaagaaggcggggtaattaataataccaaacatacagcggcctccctattcttcttcaattatgccctgcaggattttcacacagccatccacgcccagtcgggaggaatccaggcagatatcataatatctggaatttccaaattctgtggcagtgtggtaggagcagtatttccggcgctttttatcaatcttacgtatttcatccgccacctgctgctcagtctgctcaggcattttctgcttcatgcgctccaggcgccattcaaaggcagcatggataaatacatgaaggctgtagtcatattcccataaaatgctgttggcattccggcctacaatgatacaattgcctttctctgcaatgtcctggatcacctgcttctgggcatcgaagatccggtcgctcaccggacggttatagaagtcaaacaggctttgggtaaaaccgaagttaatgggcacgccctcgtcccatttaataaagttgtagatgtccagattgccttttcctgccatcatgagaataagctctttgtcatagtattccagtccggtctgctgggagagcatataaccgatggtgccgcctccggccccgaattcccggctgatggtaacaatttttttcatagctgtcctcctgttggaaatgctgtgaggcaaatttataatactttatttaaaaagtctatggtgcgggcttccctgggatgattaaagacttgatccggggttccctcttccacgatatagccgccgtccatgaaaatgactctgctggccacttctttggcaaaaccgatctcatgggtgaccacgatcatggtcatgccctctgaggccagctttttcataactgccagaacctcccctaccatttccgggtccagggcggaggtaggctcgtcaaagagcataatgtccgggttcatggccagggcccttgcaatggccacacgctgcttctgaccgccggatagctggggtggataggcgctggccttggattccaggcccacacgcttcaggagctccatgcccctggaaattgcttcatcctttgtcattttctttaagtccgtgggggccagggtgatgttccgcagcacggtcatatgggggaaaagattaaagtgctggaataccataccgatgttttcccggaatttgttcaggttgatttttttgtcagaaagattgactccatccacaaccacctctcctgaggtgatgtcctccaggcggttcaggcatctgagaaatgtggattttccagaaccggaggggcccaggaccacaaccacctctccttcgtagatatccgtgtcaatacttttcagaacttccagactgccgaagtttttcttcagcccccggacatgaatttttactttagcgtttggatccaacgttaatcctcctctcaatcgctttcgccacacgggaaagggatacaatgacgatcaggtacataacggcgatgatcccccaggtttctgtggtggcaaaggtgtttcccacaatgatgttgccggctttggttaattccgggaatccgatgacggacagaatggaggtatccttcagggagatgatgaactgattgataatggacgggatcatggtgcggatggcctgaggcagaatgacccgctgcatggtccgggcatagccaagtcccaggcttctggcggcttccatctggccaatgtccacggactgaatgccggccctgaagatttctgccatgtaggctcctgcatttaaggacagggcaatggttcctgctgtcagagcggtaaaccggaaggatgggtcaatggtcttctggatcagggaaggggctccaaagtagatgaagtaggccagtacaatgaggggaattccacggatgccgtccacatagatggtggagatgatgtttaatacccgttttttgctcacgctcatcataccaaagatcaggcctataataaatgcaaatattaatgaaagcagggtcagaagcagagtctgtcccaaagccttcagcagcatggtagaatatgtctgtaaaatcgaaagcatatgctacttcctcctattcttttgggatgttatgaaatggcataaaaaacgcagcaggttctaggattcatccgcttcctgctgcgctcttttgtcggcatgaaaagaggaacatcagcttttcatgaataaatgtgattattcagctttttctgtatctgcctctgcatcagcctttgtatctgcgtcttttgtttcatctgtggcggtgtattttgctacgatctcatcgtatttgccgttgtccatgatgtttttcagaccagcgttgaacatttcaagaagatctgcattctgtcctttataaacggcaaatccataggaggagcctgcagcggtcattccctcggggatttccataggagcgccctgctgaacgttgtaggccattactggataatcctcaaagcaggcaacggtgttgccaagctgtacgtcctggtacatggtgggggaatccttaaattctacgatctcaaagtcatattcttctgcgatggattttgcatagtcagagccattggtagctgtcttaacagcaaccttctgtcccttcaggtcttcatagctggcaatctcggagcccttggcaaccgccatggtaacatctgcattatagtaaggttcggagaagtcgaatttctcttttctctcatctgtgatggacatacctgcgatcacgccgtctgcctgtccggactgtacagccagaagtgcagcgtcaaaacccagagaatttaactcgtagtcaaagccctggtcttctgcaatggcagctacgatatccacgtcaatgcccacgaattcgttgtcggcattggtgaattcaaagggggcgaaggtggtgtctgtggcgatgataaattttttgtcagcggccatggtgggagctgcacaggcacacatcattgcggcggcagttccaagtgcggttaaggttttccatgtgatttttttcataattttacctccggtctattatagtgaattgataacgcaataaagcttctacccctcactataaaggaaatttagcaggtttgtcaatggatttttgcagttctatgaagaattcttcataaaatggagggccggtgggggaaatttccctcaccagccctgcttttatcaggaaatggtaatttttgttgcttcagactgctgggaccagcggccgaagattttcagaccctccttgtttgtaatataagcccgcacaccgaaataataggttcccttggacaggtttttgaaggtgacggtaatagaattttagaatattggtattttttgtcaattaaaagatacggatctcgtatggatttcctggggccttccatatcactgcttccagggaagattcgggaaattccgggtgaagcgcttttctgccgctgaactggagaagcgaaacgccgtatacaagcaacttaaaataatatatgatataaccaacaaacagacgaaaatgaatttgatgaaaggtggggcgtggatgaaaagagttgcaattggaattcaggattttgaaaagttacgaaagaatgattatttttatatagataaaacagaattcattcgggagtggtgggagaatggggacagcgtgaccttgatcgcacgtcccaggagatttggcaagacccttactatggatatggttgagaaatttttttctgtgaaatatgccggccgcagtgacttatttgaagggctgaatatatgggcagatgagaaatatcgtcagctccagggaagctatccggtcatttacctttcctttgcaaatgtgaaagagcagagctatcaaaaggccaaagaaagaatctgccagattctcatagatttatatgggaaaaataatttcttgagggaaactaaagattgggaggaacaggatgaagaattttttataagcgtaaataggaatatgaatgataccgtggctacaatggcggttcataaaatgtgcggatttttacagcgctattatggaaagcatgtgatcgttttgttggacgaatacgatacacccatggaggaggcgtatgtaaatggttattgggaggaattcacgggatttatccgcaatctttcaaatgcgtcctttaagaccaatccatatatggaacgggccattatgacagggattaccagagtgagcaaggaatccatcttttctgatttaaataacctggaggtagttactacaacttcagagaaatacagagactgctttggttttacagaggaagaggctttttcagctcttgaggagtatgaactttctgattcaaaagcagatgtaaaggactggtacaatggatttgtctttggaagcaggaaagatatctataatccatggtccattattaattttttggacaagggccagcttggaatgtattgggccaacaccagctccaatagtctggtgggcaaattgattcgtgaaagtgggaaagaggtaaagcaggattttgagattttgctcaatggaggaaggatcaaggtagttcttgatgagcagattatatataaccagttatcacaccagagaaatgcaatttggagcctgcttcttgcagctggttatttgaaggcagaaaagacagaatttgtgaaacgccgcgggtatatctattattatttaacactgacaaatagggaagttctctttatgtttgaacatttgatcgatgggtggtttgcaaattatacagaaagctataacgattttatcaaggcattgctgaaagatgatttaaaggcaatgaatgtgtatatgaacagggttgcactggcaacattcaggttttttgacagtgggaatcatcctaccaaggacactttgccggaaagattttaccatggctttgtactgggaatgttggtggagctggagggacgatatgtattgagctcaaacagggaaagtggactgggaagatatgatgtgatgctggagccgttgaataaggaagacgatgggattctggtggaatttaaggttctggatgaggacgaggaaagagatctgtctgataccgtgcagtctgctctggagcagattgaaaagaagcagtatgcagcttctttgacagccaagggaattccagaatccaggattcgaaaatatggttttgcctttcagggaaaacggatcttgatcggaaaagcataagcaggataaggggcgggcgaaattgtgaaatcagcccgctccttatgttaaaggcttataaattggggatccctaatttttctcaaggaaccgctgctgaatacaggtatgtataattttaaagacacagcagcataagtacacgagagggaaacttaagagccatatggtatttgtcagaacaattactttttgggagtgaaaccatctgagtaattgaaatattaaaatatgaaacagatagatttcaaaggaatgctcacctacagccgtaaccaccttaacaatgagcctgagtataggcttttgcagtaaatgggcgatcattccaagaagtacgcacaatccgggaacgattaaaatgaaaggataccaccacaaagcgtgagaccataatttgtctcgctgaaaggtcatggccagatcaagtccccatacgctgcctattgacaaaagaaaaagaggcagcacattttttatggtgagtcttttcttgcagaaccgtgcggcgatcatacccaggtaaaatatgggcagccttgaaatagagatgatcagtgcccggttttcccaaaagggaattgacacaatcaccagtataagtaaaacggcaatatttttcataaaggagaaccttttgcagatggatgcaagataaggggaaagcaggtacagaattattaaagcactgatgtaccaattgaagtgaccgccctggccggtcaggctttgaatccccaggatatttccaatgactgcccgcactgatatgtggttgatccatagatttaccgggatccagatgtacataaataagaaccattccggatagatcctcaggaagcggcgttttataaaagcaaaactatcgcagtccttattataagaaaagtagcagccgaagccggagcaaaataggaaaatatcaacaccgccgtatccaatcgacttgataaattgaaagacggtattgttataacgcagtccgcagtgatacaaaacaatccatatcattcccatacccatcataaagcttctatattgaaacagatccttaaaacacaggggcttaatcgatttattcttactgccagagtccataattcatctctccttacagttgccggctgaacggctgttccaaattctaaaacacagcggtgctgtcttttgacagactggatggcaacagtactattttttaatactttagcagatatcatggggttatacaaccattttcaaacagcaatcagcagcttatgatcagaattaaggcgggcatagatgtggctgagaacaagggatgcaggttattgtaatgcagtgtcagaaaaaaaccgcccactgttctggatgagcaggggcggcatgtgtcagatatccagttgtgagaagtcaatggacaagtcctcatatattccggctttaacggtatcggtaaaagtgtactgttctgaggtgctgttttcaaaattataaaccataataagatttttggtatggtcaacaatccaatattcccggacctgagtagtacggtatttaaaaagcttagtatagtaatccatttgcctgctgtctggtgaaactatttcaataacccagtcaggagcacctttgcagcctttatcgtcaagcttgtttttatcacagataacagagatatccggttccacataggtatcggtgtgttcatctaagtaaacggcaaatggggctatatccacttcgaatgaaccgcccttatggtcaatataatctgctatttttctgtaaagtgaaccaagaatctgttggtgtgtcctggtgggcggtgccatataataaatatggccgtcaatcagctctgcccgctctccctctggcagggagtaaatatcctctatggtatagatttgttcctgtggtaatggcatggtaacacgacctttcttgataatagtgttgacggttggtggctaagttattcggagtcccggcgaatagtctctgtgatagcacggtttatgaatccatttagtgattcattttgagatgctgcatgggatttgtattcttcttttttacctttgggaacagtgagttcgattctgtcataattgtttttgacatatttgtgaacggctttttgctgtgctttactgattttggtatcttctggcatgtgttcacatcctttcaaaatgaggaaattttaagatgagtataccttttctattaggacatgagtataccatagatttctattcacgtaaatatacaaatgcaacaaatatattcacgtaaatatacacgaaatgccaatagactattcatgtaaatagatatatgatgtaatcaagataaaggtaaggaaaacagaacagctaaggtggacgggagtactggaagggaaagcaagagcaccacatgacaccggggagcaggataaggggataatgagacggtcagagaccttagatactttaaagcctggcactgaactgatctggggcagcagaggtgacgaaaagacttacaaggccaggttctttgggcagtgtcaggtacaaataattgaatccgcataaaggagagccttgcaggcttccagggaacaataatataaaatgccccgtcgagcggcaactctggcaggggcgcacaaccggagctatacaaataaagttacagaaatagtatagcagaaaacccattagtcttgtaaaaatagtaatgaacagcatgtttaagcaggcagtaagaaacggaatcattcagcggaatccagttgaaaataccacactgccaaaagagcagaagcggagggaggttcgcgtaatgacagtagaggagcaaaagcgttttttgggaattttcacaggaaagcatctattatccattgtatgtggcagtattgggaactggcatgaggaacggcgagttaagagcgttacaatggtgtgatgttgattttaaaaataaaataatccatgtaaatggaaccttgaaatacgaatcttgtcgtcacaacctccgtcatacatttgctaccatagaccttgagaacggaatgccgccaaaagtcatgcaggaattgttggggcatacctccattacaatgacattggacatatacagccatgtgcttccagataccaaggccaatgaattacagaagattgccaatattttttaagggaaaggtcacctgctgtcgggtggctttttctttagataatatgttcttgggtaaaatttgggtacaactgtgagtagcatggaatttttgaagacatgtataaggaaggaaaatctcgcaaacccctacaaacagacagtgaaagacccggtaggggagctaccgggcctttcgaggggagtataaataattaaataaggggttataatgtaaaaaaaatttttgaagggtaaattctttttacattaaagattataatataaactggaaaaaaaagcaataacatttcgtgaatattctcgtatctttttgggataatacacaatgtaatttaaaacaccaaaggaatacaggaggaattttcaaatgtctaagaattatgaaaatgaaaacaacaaaaactgcaaaaattccaagaacagctatggaaatgccatggactaccagaactcaaacaacagttctaacaacagctccaatcagaattctaacaacagctccaaccagaattccaacaacagctccagccagaactcaaacagcagttcttacaacaactccaagaacagctcttccaacagcagttcttacaacaacagtaccagcaacaatagcaacaataacaacaaaaacaactcctctagcaattcttacaacaacaccacaaagaatagttcttcttccaacaacaagaacaattcttccaacaaaacctctaacgcatacgagacagacgaaaactacggctccagatactagaagctaaggtgagactgtgaagcactgccccataggtgaattcctgtggggcggtgcttttttttataggaaagttcttcgaactttcctatgtaataaaaaccctccgggggatgcacacaatgtgccagggaaagctgcttcgcagctacacattggcgcacaaagctgccaagcccctcatgagtgaggggatggggagttgaagcgggcttgtctgctttgttctgttcctgaatgcatttagtatttctcaaaaaccttttgtatgacattgttataggttaattcacggaatttatccataaagccaaaagatcttggctgggcggcaccttttttccctgaacgaagggcccggcttttgaatagaataatgtagaagaatcaggaaaggaggaatcttcatgttccaggtggaaactatctcacctaaaatgctggactactatgtgggccgcagggacgtttatcttatagatttgagagaaaaagagcagtttgaaaaaagtcatatccggggggctcacaacttgccctacggggattttgacccaaaaggaaattttccaaaggataaaattctgattctctactgtgaccggggcggcgccagcctgctggctgccaagcagcttgccaagcgaggctgctgcacacggtctctggtgggaggatttgaaggatatcgaggaagaaaccttgtaatttcatagcgggcatagtacaataatagcagcaaactccataaaagacaggacctgcacaggtccggcagccatttatggagtgaagctgcttccaggctgcacattggtgcacaaagcagccaagcccctcatgagtgaggggatggggagttgaagcgggattgcccgctttattcagaattcggataaatacaagaaaacagggagaaatttatgaaatatatgtttgcatcagacatccatggatctgcctatttctgcagaaaaatgctggatgcctatgagagagagggggctggccggctggtgcttctgggagatctgctttatcatggccccagaaacgaccttccaaggcagtatgcacctaaggaagtgattgccatgctcaatgaaaaaaaggaagacatctacgcagtgcggggaaattgtgaagcagaggtagaccagatggtgctggattttccggtgatggcagattactgtattctggagatccatggacggaccttctatgccacccatgggcatatatataatgaagaaaatctgcctcctctggggaagaaggacatccttattcatggacatacccatgtgctgagagcagacgtgctggattcctgtacgattttaaacccaggctctgtgtccataccaaaggaagggaatccgcccacctatgcagttctccaggacggagtatttaccataaagacctttgaaaatgaaaaggtcaaagaaatcagcctataattagtgaagaaagaggtcataatgaaccatatggagttaattgcgccctgccatttcggattggaagcggtgctgaaaagagaaatacaagatctaggctatgagatcagccaggtggaggacggcaaggttacctttcaaggagatgcccaggccattgcagatgcgaatatatttctgcgtaccacggaacgaatcctgctgaaggtgggacgagtaaaggccacaacctttgaagagctgttcgaagctaccaggaatcttccctgggagaattatcttcccaagaatgcaaaattttgggtagccaaggcaaactcggtaaaaagcaagctgttcagcccttcagacatacagtccattatgaagaaggccattgtagagagactgaagagcgtgtataaggtagaatggtttcctgaggacggagccagttaccctatccgggtatcctttatgaaggacgtggctactatagggatcgacacttccggagtatctcttcacaaaagaggctaccggcagatggtggtgaaggctcccattacagagacgctggcttccgccctgatcctgctcacaccctggaataaagaaagaatcctggttgatcctttttgcggaagcggaacctttcccattgaggcagccatgatggcggcagatatggctccgggaatgaaccgttccttcctggctgaggactggaagaatcttgtacccagaaagtgctggtacgatgcccatgaagaggctcaggaccggctggatactggtgtggaggtggatatccagggatatgatattgacaatgaagccctgaaggctgccagagccaatgcaaaaatggcgggtgtggatcatatgatccattttcagcagagagcagtgaaggatttgagccactccaagccctatggttttctcattgccaatccgccctacggagagcgtctggaagaccgggcggctctgccacagctttacaaggaaattggagaaagcttcgccaggctggacaaatggtccatgtatctgatcacttcctacgaacaggcagaacgggacctgggaagaaaggcagataaaaaccggaagatttataacggtatgttgaaaacctattattaccagttcctgggaccaaagccgcccaggaaaaaaataaatcaaccatagagaggaaactgtgaaatgcgcagattaatatttgctacaggaaatcaggataaaatgcgggaaatccgtgagatcatggctgacctggggctggagatcctgtccatgaaagaagcgggaatcgagctggatattgtggaggacggcgaaagctttgaggaaaatgcggcgatcaaggcaagggctgtgtgccgggagtgtggagaattggttctggccgatgactcgggcctggaaatcgatgctttaaacaaagagccgggaatctattccgcccggtatatgggagaggatacctcctaccggattaagaatgcctcgctcattaagcgccttgagggggtccctgacgaaaaacgtaccgcccggtttgtgtgtgccattgccgctgcttttccggacggaaggacagagattgtgagagagaccatggaaggcaggattggatacgaggaaaaaggggagaatggctttggttatgatcctattttctacctgccccagtttgcctgctattccgcagagcttccaagagaaaagaaaaacgaaatcagtcacagaggaaaagcacttcgtgccatgagggaaaagttgcatgagaattttgattgttagtgatacccacggtcacagccgaaatttagaacgggccatgctggcagcaggtcccattgatatgctgatccactgcggagacgtagagggagaagaggactatattgaagcccttgcccaggtgccctgctatatggtctctgggaataatgattttttctccagcctgccccgggagcaggagctggagatcgccgggaagcggtttcttattacccatggacattattatggggtgtccttgaatatggacggtgttttggaggaggccagggccaggaattttgacgtggtgtgcttcggccacacccacaggcctgtgatccaaaagacggaggacttgatcgcggtgaatcccggaagtctttcctatccccgacaggaacgcagagagcccagctacatcattctggaggcagataatggaagactggactttaccgtgtatttcctgaaaagaagctagtactccatctggtattgacagtaggtttttcagccagctggagtactgcaaatgcttttacaaaattgcccggaagatttttttgaaaaaagtacgaaaaagttgttgacaattggaaaatgctataatataatatgtcttgcgtcagccgataaggcagcacaaacggcgcacaagaattttatagtaaagcattgcggggtgtggctcagcttggctagagcgcctggtttgggaccaggaggccgcaggttcgaatcctgtcaccccgattgctgttaggttgattaccgtttcagcgacatgcgggtgtagttcaatggtagaacactagccttccaagctagatacgtgggttcgattcccatcacccgctgtgatttgtgtctgtagctcagctggatagagcaacggccttctaagccgtgggtcgggggttcgaatcccttcaggcacgctgtggtgggtatagcgcagttggttagcgcgccagattgtggctctggaggcccagggttcgaatccctgtatccacccttgccttttgggctatcgccaagcggtaaggcacagcactttgactgctgcattcgttggttcgaatccaactagcccagtcgcatatggagcattagctcagttggtagagcacttgacttttaatcaagttgtccggggttcgaatccccgatgcttcattgatcgtagatagcgtaaatccttataaatcaagggtttacgcctttttttattacataggaaagttcttagaactttcctatgtaataaaaaccctccgggggatgcacacaatgtgccagggaaagctgctttgcagctgcacattggcgcacaaagctgccaagcccctcatgagtgaggggatggggagttgaagcgggcttgtccgctttgttctgtctggaagatacagatcaaaagttggcacagatggaagagtaaatgtctcacttttgtctcacaaaaccagtgcgttttctacggccaatgcggcgttctccttttgcaggataatgtggttgtaaacctcgatcaccatcttctcggtatcacacaagagttccagaagctttctaataaaaccctccgggggatgcacacaatgtgccaaggaaagctgctttgcagctttgttatgcaattttcttctttaaatcttctacgtctttctgcagtctttcgatgatcttcagcaacaaagcagagttatcattctctaatttagtaatcctgtaatattgctggagctcttcaagatttttctttacctgttctatttgtgtatctgtgtgatcctgtacccggtcaagttctttcaaaattagattttctgactggccgatgcggctgtcgattaaatttgcaattgcctctaagtctttttgctctaacatttttacctcctggatattggtctgccagaaggagcttgtctcttccagctgtttttattataatatatgtccgctatatattcaagaaatatttttcgcacgaagttctttttcaacacaatcaataataaatttagtcatacttttcccacgtttctcggcctccaaggaatatttttcttttaatccttttgggactctcagacggatatcatcagttttctcccgcatatattttatgcttgctttcttttgtgcttcggtatatggcatcctgtcgcctcctttatataactataacacagcttttatatgtacactatatacatattgcacaaatacgtccgctatattctatgaaattttacgtcgtataaaccatgtatatatcaaggggtaataaaactgggctggctgctaccttgtgtaaatatttcatattgacacctccaggtaatgatgctaaaatcaatatcccacgtttgacactttgttacgttaaaaatcccagaaaacattgaaaaatcgatgttttctgggatttgttgatttttatgaaaagcgtactaactttttccagctacctcatttttgatctacggataatcccctgcatcgcctttgtacggataatctcataatcggttatgaaaccggcatactcgtgaagtgcatccgtcagatcagtcgcagtatacgcaggaacgtacccggcatcctttgcttttgtcacgcgcatttcccgcagagtggacacaatctggtcacaggtatatttgtccccaagtttcttttccagcacacggtaaaccagaagtgacatgaaacaggtcatgaagtgagctttgatcctgtctgcccggcttaggtatgcgggtctggacaggaactcgtctttcatgatccggaaagattcctcgatctcccagcgccctctgttaatcttcaaaatttcgggtacatcatcatcaaggtttgtctccacagcataaaagccgtcatattttttctcctcagcgatcgcatcttcattcagggaataactcacattcacctttttgcctctgctgtttttggcttcctgtttcacaaagcggcggaaatcatgctggtttttcttttcaagggaagaatggttcccttcgatggctgctatcgcgcgctggatctgcccatcccgtttgtaacggagaaagttgcggtattttaaggaaaaagtgacgatcagtgtttggttgaattcaatatccctttcttcgtcatagtcttcgatgtatttcagtttataaaaaatcttgtcgtagttttcttcttgatctttttcgttatcttctaaatgctcgatattataaagcttgctgctcccttccatctgccagccatcgggtgccaggcaccattcctgcagttcttttcccatcgtctttacggagactgtggtgacaaaggagcgctcgccgaagttgttgaacttccggtttgcctcgctggcaaggccggcgtctgtgcagacaacgaatctggacagttcgaagtcctgcaggattttctcttccaacggtataagggtggtctgctcgttgcggtttcccctcccgatacagatggcaagcgggatgccggaataatccatgaacaggcccatttggacgagtggggaaggctggtgctgcttgctgtgcccgtatttgcgtgctgccgtttccagggcatcggcttgcgcattggaaatggcgtcttcttcttccgtttcaaaatagaaattcgtgcagtcatagtagagaacaccggttttccgagggacaacgcaagagctgaatttatacagctccgcttgtatggagtcaaactccgaagcgatcacggacagtgctcttgcgacctggtggtattcgaaatccgggggctccagtaaccctttggaaagacgacaggtagagagcttagagccagggaaaagaatgcgtccgtagatcaggcgggaaaggatagcgttcatgtcatactggaaatgatgccgtttggttatgtgcctagctatcagatcgatgcagagctcatagtaaactttttgcaggaagaggtagccgatgttgaaagactgtctctcatttttcgggatgcgtgtatagggggagtacggaacaagtatcttttgattttttcttgcctgatccttctcgttgagctcagccagatgctcctgcatccactgaaacggatccgcgcagtgatacttttcagagatttcttcaggatagccaagtttctcgtaggtttcactggtgttttttccatttttgtagaccgaccggatgatatagtagcatttacctttttgtgtttggttgtacttaagacgcatttgaggcacctccgcaagatatagtatccatatggttatagtataccacaaagtacgatagtacgcaatataaaaatatttatttgacacaaaaatataagcctatcaaggctttgggggattttgagtgtcaaacgtccggctatattctatgaaattttacgtcgtataaaccatgtatatatcaaggggtaataaaactgggctggctgctaccttgtgtaaatatttcatattgacacctccaggtaatgatgctaaaatcaatatgtcttaaaagtgtcctacaagattttaaaaacactcgtattttaaaggatttcatggcataaaacaacttgatttttagttaagttgtccggggttcgaatccccgatgcttcattgaaattatggaaatccttatagaagggtttccttatttttattaagcggttatggcggaattggcagacgcgcaggatttaggttcctgtgtccatgacgtgtgggttcaagtcccactaaccgcatattagaaaaagcactgcaggggtgatttcatatcaagctgcagtgctttttcttatataacagagaattccaaaggaatttcctgttatataaaatcctctgaggggatatacacaatatgccaaggaaagccgtttcgcggccttccctggcacctgaagccgtcaagctttgcaggagccagagaggagttgaaggcgccttacctgcattgttccgtctagataacctcttattttaatataagaaaagcgatagtgatcattgcccaaataaagaataagattccatgcaactttgccaaaatgtttaatccgttgttttgcgctttttcttttgtaaataaaatattagaattgatcaaagagaacgctaatattaaaagtgagtaattagaaacattcgtatgattacccatataaagtgcgtatccgtacccaatccaaaaaagagataaagcggtcaaggtgattgcttgaaaaaatttcaaatcttttacattcctagctgtgttattttccgttaaatgtttttctgccataatcagtactcctttcccagacaaagtgttttatgaatactcacttcctgttatttaagatgagtataacttatttcatgtataatgtcaattatttcttacataaagatataaataattatcaaacgccattgggtgtatgatatgcagtaattataaggaaaagtacttggatttttagcagaaagccgcagacggtaaattttgcaattttagcttagaggttcctcttgtgcagctctttgatcattgtatagaatgaggccgccacaccattgatttttcaatctcaggtgtagcagcctcattaaaagaagagtatggcagtacttttcctgcttcttcattttttgaattaccttattactcttaacaccgctatattagcaagtattgtgagtattgtaagatcatatgtaagggatagcgcacttgtatagatcagagggtcacttgtgattgaaaatgtatagtaagaacatatatttagcagaatgaacaaaacaatgatccctctaacacaagacgtagcgatgatccccctgccgcgctcatcttttccttctttggaaaagcaatatgcaataaatataattgtcaacacaaaaagcagtatttttaatatatagatgaatgccacatttttaaaaagttccataattaggatcggcattttcaattccattttattctcccctttcaaaagaaaaaagttatttgatccacgtagccctgctgggcctcatttcccaaagattatttgggcaatacctcctcaaagtcaaataaatcctctatactcacttcaaaaactttcgcaatactatatgccagcagcatggatggattatatctgtttctttcaagctggataattgtctgccgtgatacgccaacaagatcagcaagctcttgctggctcattctttttgtagctctaaaaacatgaattttgctttcaaatttatatttgtctattttagccacctgcacaccacccttattgaaataatctactgctgattataacatatttcttacattttgcgatggattttccttgcctgaaaaataaagaattttctgaagaaacatttctagaatcatgatataatagaaagtagcacaaaaacagtctatatagaaaaatattggagggatcatttatggcaaaatacaaatgtagtgtatgcggatacatattcgatgaagaggcggaagggaagaggctggaggatcttcaggaatgtccggtgtgccaccagaagagcagggtgtttgaagaatacatggaagaggcagctcaggagccagcactccctgcaaaggagatgagtctggactatcctcaggcttatgcaagaaaagatgcagggatccggtatatggaggaaattcatgagatggcagtatccggctccagcatcattgctgccatgggcacccagatgcctatgcctgggtgggacgatattctggtgctgggagcacagctggaccccatgcccttggatgaacatgcgccggtgaatatccagacggttataggcaaacatgcccgcaggcctatggttctggaggggccggtgtacgtgtctcatatgtccttcggcgctctgtcaaaagaaacgaaggtatcactggcaaagggaagcgcaggggcccagaccgctatgtgcagcggagagggaggaatccttcctgaggagctggaggcctcatataaatatattttcgaatatgtgcccaaccgttacagtgtcactcctgagaatctgcgcagggcagatgccattgaaataaagatcggacagggtacaaagcctggaatgggaggtcatctgccgggaggtaaggtgacgccggaaatagcaaaaatcagaaataagccgttgggaaaggatgtgatcagcccctccaggttccctgatgtgaattccagggaggatctgaaaaatctggtggaccagcttcgtattgcctctgagggacggcccattggcattaagatcgccgctggaagaatagagagggatttggaatactgtctgtctgcagggcctgattttgtcacaatagacggacgagggggagctacgggagccagtcccaagttaatacgggatgctgccagcgtacccacaatttatgcccttcaccgtgccagaaaatatctggatgaggcaggatcagatgtagagctggtgatcacaggagggctgcgtgtgtcctcagactttgcaaaagccatagcgatgggagcggatgcagtggcggttgcttccggcgccctcattgccgctgcttgtcagcagtaccggatctgcggcacagggatgtgtcctgtgggagtggctacccaggatccagagctgcgttccagactgaaggtggagacagcggcaaagcgcgtggaaaattactttaaggttgcctttgaggagctgaagacctttgccagaataacgggacatgaagatcttcatgatctgtgtgtggacgacctgtgcaccataaacagggaaatctcccagtataccaatatcccccacgcataagctcctgacacatacaaggtgagagattatgcacaaaggatgaattctgcacatcccccagcagtttaccgagaacggagtgaacaggaactcgttggttccgtgggtgagtccgcaaatgaagaaatgcttggcaaatactttggtaaatgttactattaccttaatgtgccctggccagtgaaggccgggagtgagaaagagtatcaggaacaggagtattgagatggatgtaaaggaatttcagaaaaagttaagtgagctgatgttaaaggcggctgaacagaagatgcatatgaccgctgcccaggtacaggaattttttgcacagtcccctttggatgacaggcagcttgagatggtttataaatatctcatgagtcagggagtgacggtacaaggtgctgttcaggatgaggagaaggtttctgaacaagaagcagacacttaccaggcagcgcctctcacggcccaggaagaggaatacatgaaggaatatgaggcaggccttccccagcagatggaggaggagcctgccggcagtgaaaagctgtttgcagcccttgcccagggagacaggcgggcggtgggggagcttgcccggctttctcagcctgtggtctgccgattgtgcagggagagaaatcacccggatattttcattggagacctgctccaggaagccaatgtgagtctgctgctggaccttgaggagagcctgggaaaggtgagagacatgcagtggctgtgcaggactgtgaagaaggggattgagacagcagtcagtgaccagacccagcaaaaattccaggacgattatctggtggcaaaggtacggaatctggaggcagcagtgcgggagctgacagaggacggccaggaaggggagagcaaattcagcattgaggagctggctgttattttggatatggatttagaggagatccgggatgtccttcgccttacgggagatgataagtaattctcagagaaagatcagaaactgaaggtgagtggaggacttatgataaaaatcgcattatgtgatgacaatcccgtagaattggagcagatgaagaatctgcttcaggaatatggaaatgaaaaggaaaactttgagatatctgtatttgacaggccggagaagctgctgtgggccctggaagataacaaaaaatttcagatatatctgctggatgtggtgatgcccaccattgacggaatcactgtgggagactgtatccgcagacaggatgagaacagtgtgatcatctttatgactgtgtcccgggaatttgccttgtccgcctaccgggtttttccccttcaatatttggtgaagccggtggaaaaggggcagctctacagaaccctggattttgccaggaacattgttttaaaagagacggataaagaggaagtacatttccctgtgaaaacgcccacggggatccggagtatttctctgaaggagctatgctatgcagagctggccagcagaaccgtgaccttccatatgagtacagaggagtgtatccgaagtgtgtacctgaggacctcctttgacaattatattgcggagattctgaagcttccctattttatgaggccccataaatcttttgcagtaaatatgaattatctggtgcgggtgaaccagcaggaaatggaaatgacggacgggagaatcttattgttctcccgtacctatgcccaggaggctaagaccagatatttggattttatggctcatctgggaggagggaccccccagattcattgagcaactccctgaaaggaatgcctttgggcaccgtttaagggctgcggctgggatgcggtatttcctggatatggggcactataaggggacttacactttaggagcggttggaaatctgtgctcccaggttgtcaatgtgatagtcctccttatagatgagctgggagacagggacaaaggcatagccctttttctccagatcctctatgacaacacccagggcgccagaggtatatttggactgggtgtggaacagcaggatggagccgctgcccaggacgctgctggtacacacggtgcgggcaatgtcctgaacgctgtagtccttccagtccagactgtcaatattccactgaatgggataatagccattgtccatggcgttttttataagcttgtcattgtactctccatagggagggcggaatagaaacaggtcataattggtcaggtccttgacctttttgtggacctggagaagctcttttgttatctcttcctgggacaggtccttcatgtgcaaatggttttcactgtgattcccaagctcatgaccctgtgccagtatttttttcacatcctctggaaattcttccacccattttcctgttacaaagaaggttgcgtgaaccttgtgttccttcaggactgctaaaatttcatcaatggcttggttttcctgtgcggtgtcaaaggtgagagacagccatggcttttgggtggctacggaacaaatgggcagctctttgccgttggcatttgtacttacggaaataaaaccaggggcgaagcggaaggccgtgacggtgaaggcaaggagacagaaaaaaagtaagagggttttcagctttcttttcatgggatacctcctgaaggtgttgttactattttatggaatcctccataaaatagaaccccactccctggatatggctggtgaagaggagctgttttcttacttttttcataaggatcacctgttttctggttttaatacagtcctggcagctttctctttctgggggagctgtgccaggatgatggcgctgaacatgacaaggcagcccaggatctctctggaactgagcttctgtcccaggatgatccagcctgccagcacggagatgcaggattccaggctgaggatcagggaagccactgtggggttcatatccttctggcctacgatctgcagggtatatgccacaccgcaggacagaatgcctgcataggcaatgggcatccaggcatccagcatgctggaaagctgggggttttccgtgagcagggcggggattccggacaggacaccgctcaccagaaattgaatgcaggacattttcacaccatccaccagaggggagaagtggtcaatgaccagaatgtgcagggaaaacagcagggcacagatgagcaccaggaaatcaccctgtccgatggagaaggaatccgtaatgcacagaaggtaaaggcccaggagggcaagagccacggctgcccagataaagggggtgcaggatttcttcaggaacaggcccaggatgggcacgatcacaatatagcaggcagtgataaagccggcttttcccacagtggtgtacttaattccgaactgctggaaattactggccgcacacagcagaatgccgcagcagatgcctcctatgaccagggttttccggccggcctttttctcctggggtgtctggattggctgatccttggccttggagcggtccaggaaccagatcacgggaaggagcacaacgcagccgataagatttcggatgctgttaaaggtgaatggtcccacatagtccattcccacactctgggccacaaaggccacaccccagatagcggcagtgaggagcagaaggaaagaattgcgaagctgtgtcgtttgttttttcataataacctccagtatgtacatgtaagcttaccggccttcaaggaagggcagaaggaggagcgcaggcggcccgaccggctgtcttaaaggctggcttttttctctgggctttattatataggaaaaattttatataggaaagagctatttggaaaatatgagaaggataaggagcggaaaaagggaaaaaacagggagggcctttttcagaccctcccaggtgtacaaaaataacaacggcgtacttagagaagtatgtatttcaaaacgaagagtacagccaaaacatacatgagtacgctgatcttcttttcttttgcacgtccggttaccaggttgatcaccacgtaggagatcacgcccagggcaataccttcagagatgctgtagaagaaaggcatagccatgatggcgataaaagcagggatcgcttccccgtaatcattaaagtcaatcttggtcacagaggtgagcatcagaaagcctacgatgatcagggcaggagctgtggcaaaggacggaatggccaggaagattggtgacaggaacagggacagtgcaaataatgcggctgctaccagtgaggtaagtcctgtacgtcctccttctgcaacaccggaagcactttccacaaaggttgtggtggtggaggtacccagcatagcgcctacagaggtaccaacggcgtctgccatcaaagcgcctttaattttgggaagctttccgtttttatccagcatatctgccttggatgccacaccgatcaaggttcccagtgtatcaaacatatccacaaacaagaatgcaaacatgatgatcacaaaatctaaagaaaataccttggagaaatccatgtgcataaaggtgggcgccaggctggggatggagataccgccggagaaatctgggagcaggctgtagaagccttgatccggagtgggggtataaagtcctgtaaactggcagatgattcccaggatccaggtgatcaggataccccacaggattccgccttttacattttttacaagaaaaatagctgtgatcagcaaaccgatcaaagccagaagtacagtgatcccctcataaccaaagcggccgtcagccacagaggatttgaaggaatagattccaaccagtgtggaatcgttgtttacagtgatcttggcattctgcagaccgatgaagcagatgaagaggccgatacctaccgaaactgcatgttttagattgatgggtatggcgttgaagatggcttcacgcacattggtcagagacagagcaatgaagataaggccttctacaaatacagcggccagggccatctgccaggagaatcccatgctgaacacaaccgtataggtgaagtaagcgttcaggcccatgccaggagcaaggacgaagggatagttggacagcagggccatgagacaggtggcgataaaggaggccagggccgttgctgtaaagacagcgcctttatccattccggagtctgccaggatcgttgggtttacagccaggatataagccatggtcataaacgtggtgataccggcgatcacttctgttttcacgtctgtgtgattttccttcagatgaaataatttctcaagattcataattgttcccccttttataaagcattgctttttttattaaaatatctggcgtcccgccacatattttccaatgatttcacgctcgtcggaaaggtaggtcaaccgctccagacggtttttcaccgtgagctttttcggcgtgcgcagccgtttgtcatccaggatgactgcgtcaaattcatatcctggttcaaaggctcctactttgccaaagaattctccgccgccccgggtggccagatagaaggcctcatccacagtgagaggagccagggattcatccacaagtctccagcgcagcttggaggcctgaatggcctgggccatggcaaataaaatagaactggtggtgcctccggctatgtcagagcccagacctacgtgcaggttttcattgagatacctgcgcactggggcaatgccggaagataagttagtgttggattccggacagtgggccacgaacacgccccgctccttcatcagtgcgatctcctcatccggacagtggacacagtgagccataatagcaggaaactcaccgccaaataagccgaactggtcataggcctccccataaaaacgggtgtttggacacagctccttcacccaggcgatctctccgaaattttctgacagatgggactgtacagggagcttactctctctctggatcacggagagcagcttcatgagctcatcagagcaggagggtgtgaaccgtggggtaaggataggacggacattttcatattttccgtcaatgtcacacagccaccgggccgttgcggctgcagcgtccatggggtccttttcctgaagaccgggagctccgttgcggtccatatttacctttcctacaaaggttttcagtccggtttcctccatcaggtccatgagaagctctgtggcctccacgtggagggttgcgaacatacaggccctggtagtggcgccccgcttcagatcctctgcgaagatctcataggctttgcgggcgtactccagatctgcatactgggcttcctctgggaaggtataggtgttcagccattccagaagctccaaatccataccggttgcccggaaggaatactgaggagcatgcaggtgcaggtcagtaagacctggaatgatcaaggcatccttgaaatccgtgcagggaattccctcataggactgagggagctggctgtaaacgccggaacagatgccgtcttcacagacaacataagaattttccgcgatcacaagatgccgctccttatcgctgtaacaaagattaccttttagtgcaaatgtgcgttctctcattaaatcaccttcttttcttgtcctgaggctataaatgggcataaaaaaaccaccctaaaaagaatccaaagcccccttgaagaacttatagacaactattacggtagttggtagagacgtccaaccgattatggacttatataagcttctatatacacgcaacatttaattacacattcattataaaatatgtacagttttctgtcaatgcttttgcagtttttgtgcaaaaataaggtgtagatttttttatgaaaattttatagaaaatgtacaataaaagaagcggagcattgctaggcaaaaggaaaaattgatggtacaatgtactacaaccaaaaggcacaaaagccaacggactttgtggaaaaggaggagattctttgaatttaaataaagaaaatatgcagaaggccatgtggctcatcacctttgcggtgtttctgtatctgggacttcagcatctgggaattgtcctgaatgctttgggatttatctgggggcttttgttcccctttattttaggggcggccattgcctttgtgctgaacgtgcctatgaaatttatcgaaaagcatttgtttggcaggcttaaggaaaaatatcccaaggccgccagtaagctggccagacctgccagccttgtgctggcccttgttttggtgctgatcttgatcctggtggtagttttggtggtggcgcccaccctggcagataccattgtatccgtggccaagcaggtggaggccctgatcccccagatccaggaatgggccatgaaaaacttccacagcgacagccccattgtccagtggatccggaccattgacattgatcctatgaaaattgcggattccctcatgaacctggtgaaaagcggggcggacaatctgctcagctccacgctcacagtgaccatgggcattgtaaatacggctatgaatgtggggattggctttattttttcctgctatgtgctgttggctaaggaacgcctcgccatccagacaaagaaagccatttatgccctgatccccaaacgggcggcagattataccctccatgtatgctctctggccaataagaccttctccagctttgtgacaggccagtgcattgaggcagtgattttggggagcatgttctttgtcactatgactattttccgttttccctatgcattgctggtaggggtgttgatctcctttacggctttgatccctgttttcgggggctttattggatgctggatcgcctttttgctgatccttattgtaagtcccgtgaaggccgtgatgttcctggtgctctttcttgtgcttcagcagattgaaggtaatctgatctatccacatgtggtgggcggctcggtaggcctgccctccatctgggtgctcatggccgtcaccgtgggcggcagtctcatggggattgtgggaatgctggtgttcattccccttgtgtccgtggtctatgccctgttccgggaatgggcctatgcaaggctgaaggtgaaggggattgatcccagccgtttataaaaaacacaggggccgggcctttttccaatgggaaaagggctgcggcccctgctgattttatttggcaggaggcgcagcccttaagaaaatgagtattctattgttagagagagttagttgttattttcaacctctgccattttcatggcgcgaacctttaaaggaaggccgaacagagtgataaatccgtctgcgtcgtggtggtcatacagatctccagtggtgaaggaggccagagattcattgtacaggctgtagggagaggtggtgccggctttgatgatattgcctttgtacagcttgaatttcacttctccggttacatatttctgggtggactccacaaatgcctggatggcttcccgaaggggagtgaaccattttccttcatatacaatctgggcaaactgacttcccagcttcttcttggtttccatagtctcacgatccagaatgagctcctctaactggtcatgagcttccatgaggatggttcccccaggagtttcataaacgcccctggatttcattcctaccacgcggttttctacaatgtcaatgatcccgatcccgttggctcctcctaatttgttcagctctgtgatgatctcagagaccttcatggcctttccgttgagggttttgggaacgccggcttcaaaggtcatggtcacttcagttgccacgtctggtgcaacctggggagttacgcccagaaccagcaggtggtcatagttgggctctgcggcagggtcctccagctccagaccttcatggctgatatgccataagttccggtcgcggctgtagctgtggcttgcgtcaaagggaaggttaatgccgtgggcctggcagtaggcaatttcgtcttcacgggactgcatggtccatacgtctgtcatacgccatggtgcaatgatctttaaatccggagccagggctttgatgccaagctcgaagcggatctggtcatttcctttaccggtagctccgtggcagatggcgcttgcgccttccttgcgggcgatctctaccagccttttggcaatgacaggacgtgccatagaggttcccagaagatatttgtgctcatatacagcgcctgcctctacacaaggcatgatatattcatcacagaattcatcaattacattttcaatgtataatttggaagcgccggaaagcttagcacgctcttctagtccgtccagctcagagccctggccgcagtcgatgcagcagcagataacctcataatcaaaattttctttcagccatgggatcagtgccgtagtgtccagtccgccggaatatgccaatacaactttttctttcataatatctatcctcctgatttcctgttaagtttaaatttgtttttcttctctttttctttatcttggtggcctgcagcctgtgtctgtgctgctgacagtgaataatatacaacaaaacttataattatgcaataggcaaatgaaaaaaagtctgaaaaatattgcataaaaaggagcataataatgtaagaaaaggcgaaaaagtgcacgaaactataaaaaaccgaaggaaaacctaggaataaagcttgcatattatgcaatgaggatgtataatccatctatgacttatcaggtgcgtcaggaaccgtgacacacaaagggctgccagaggggatgcatacaatgtgtgcagcatgtcaggcatataccctgtcagaacccggaggagactgggatttaggatgcacacaatgtgccaggaaagccgccaagcccctcatgagtgagggatggggagctgaagcaagaggcgcacactggggcaggctttaggcaggagaagatgaaggagattgatagaatgataaaagcaggaattattggagctaccggttatgcaggaaatgagattgtccggctgctgctgggacataaagaagtggagattgcatggtacggctccagaagctatattgataaaaaatatgcatctgtttaccagaatttctttaaattagtggatgccaaatgtatggatgacaatatgagtgccctggcagaggaagtggatgtgatctttaccgccacaccccaggggctttgtgcctccttaattaatgaagaaatcctgtcaaaatgtaaaattgtagacttaagcgcagatttccgtattaaggatgttgcgaaatatgagaaatggtacggcatcacccatcctgcgcctcagtatgtgcaggaggcggtgtatgggctgtgtgagatcaaccgggaggatgtgaagaaggcaagactcattgccaatcccggctgttatcccacctgctccaccctctcgatctatcctttgttaaaggaaggcatgatcgaccccaatactattatcattgacgcaaaatccggaacctccggggcaggcaggggggccaaggtggataatctgttctgtgaagtaaatgaaaatatgaaggcatacggagtggccagtcacagacacacgcctgagattgaggaccagcttggatatgcctgcgggcaggaggttttcattaacttcacccctcatctggtacccatgaacagaggcattctggtgaccgcctatgcatccctccaaagagaggtaacctaccaggaggtgaaggctgcctacgataactattatgagaaagaaacctttgtccgtgtgctggataaggatgtatgtccccagacaaagtgggtggagggcagcaattatgtggatgtgaattttaaaattgatccaagaacaaaccggatcattatgatgggagccattgacaaccttgtaaaaggcgctgccggccaggctgtccagaatatgaatctgatgtttgggttccaggagagtgaaggtcttctccaggtacccatgtatccctaagaaaagagaggtgtccagatgatccggacaatgaccattgaagattatgaccaggtatatgccctgtggaaatccatccaggggtttgggatccgaaccgtggacgattcccgggagggtgtccggcgctttttgagaagaaatcccaccaccagcatcgtggctgaggaggacgggaaaatcgtgggcagtatcctatgcggacatgacgggagaaggggctgcttctaccatgtgtgtgtaaatgtaaaataccggagacggggaatcggaaaagccatggtggtgcgtgccatggaggcgctgaaaaaggaagagatcagtaaggtatccctcattgcctttacccaaaacgatgtgggaaacaccttttggaaaaccattgggtggacgaaaagagaggacctgaattattacgacttcacattgaacgagaaaaacattacagcctttaacaatgcccaggattcttaaaaaattcatcttaaagcatccataagaaagcatagataagaaagggtgttctgccttgaaattggcagatcccaggtaggaaaggggaagtttttatgaaagagatcacaggaggggtgacagcaccccaaggctttcaggcagccgcagcggcggcgcagattaaatataaggatcgtacagatatggccatgatctacagtgaggttccttgtctggcggccggaacctttaccaccaatgtggtgaaggcagccccggtgaaatgggaccaggacattgtgtatcatcatcccaccgcccaggtgatcgtgtgcaacagcggcattgccaatgcctgcacaggagcggagggctttggatactgtcaagagacagccatggcagccgcccaggcgttgaaggtggaaccggaccaggttttggtggcctccacaggagtgatcggcatgcagcttcccatggagaggctgaaagcagggatcctggatatggcccccagactttctggtgagattcaggcaggcacgcaggcggcccaggccatcatgaccacggacacggtgaagaaggaagctgcggtcacgcttgagctgggaggaaaaaccgtgaccatcggaggcatgtgcaaggggtctgggatgattcaccccaacatgtgcaccatgctcagctttattactacagatgcctgtatatccaaggagctgctgcaggcagccttaaaggaggatgtggaggatacctacaatatggtttccgtggatggagatacctcaaccaatgacaccgtgcttctccttgccaacggcatggcgggaaatcccaagatcacagaaaaagatcaggattatcaggccttcaaggaggctctgaattatgtaaacaccaccctggccaaaaagatcgcaggagacggggaaggggctaccgccctgtttgaagtgaaggtcataggtgcaaaggataaggaacaggccgtgaccttaagtaaatcagttgtcacctcatccttgacaaaggcagccatctatggccatgacgccaactggggcaggattctgtgtgctatggggtattctggggcacagtttgaccctgagaaggtggatctctattttgagagcaaggttggaaagattaaaatcatagaaaatggcgttgccactggatacagcgaggaggaggccacgaagatcctctctcagccagaggtgactgccattgcggatgtgaaaatgggcagcgcccaggcaacggcctggggctgtgacctgacttatgagtatgtgaagatcaatgcggattaccgttcataaaggagatagaagctatggttaagcaaaaatacctggacaaggcagaggttctcattgaggcccttccttatatccagcgttttaacagaaagatcgtggttgtaaagtacggcgggagtgccatgctggatgaggacctgaaggcaaacgtgatcaaggacgtggttcttttgaagctggtaggctttaaacccattattgtccacggcggcggcaaggagatcagccgctgggtgggaaaagttgggatggaagccaagttcatcaacggtcttcgggtaacggacaaggataccatggaaattgcagagatggtgctggccaaggtgaacaatgagctggttaccctggttcagtccttaggggtgcaggcagtgggcatcagcggaaaggacggaggacttctccaggtggagaagaaatattccgacggccaggacattggatttgtgggtgacattaagaaggtggatcccaaggttctctatgatctgctggaaaaggatttccttcctattgtatttccggtgggttatgatgaaaattttgctacctataatattaatgcggacgatgctgcctgcgccattgcagaggccatgggtgcagagaagctggcatttctgtctgatattgagggtgtgtataaggatcagaacgatccggacagtctgatctccgagcttcatgtaaatgaagcggagaagctgatccaggagggctttgtgggaggcggaatgatccccaagctgcgtaactgtattgatgccattgagaacggggtaaaccgggtgcatatcctggatggaagaattccccacagtctcctgctggagattttcaccaacaaaggtatcggaacagcaattctgcgaaaggatggtgagaagtactacaatgagcatgcataatttaatggaagaatccgagaagagcattctccacacctataaccggtttccggttgtttttcaaaagggagagggctgttatctctatgatgtacagggaaagaaatatctggattttgcagcaggcattgcggtgaacgctttgggctatcattatccaggatatgatgaggctttaaaggagcagatcgacaagctgatccatatttccaatctgtattataatgaaccgatcattgaagccggggaaaagctggtgaaagcaagcggtatgagcaaggcattttttactaacagcggaacagaggccattgaaggcgccctgaaggcagccaaaaaatatgcctatgccagggatggtcattcggaccatgagatcattgccatgaatcattccttccatggaagaagcatgggagccttggcagtgacaggaaatgcccattaccgggagccctttgaacctcttccaggcggggtgaaatttgctgattttaatgatctggacagtgtgaaagcacagctcacagagaagacctgcgccattatcacagagacggtgcagggggagggcggcatttatcctgcagatcaagagttcctggaaggtctgcgttgtctgtgtgatgaaaaggacatgctcctgatctttgatgagatccagtgtggtatgggacgcacgggaagctgttttgcatggcaggactatggagtgcgcccggatatcatgacctgtgccaaggccttgggaagcggtgtgcctgtgggagcctttgtgctcagtgaaaaagcggcggcggcttctttgcagccgggggaccatgggaccacctatgggggaaatccctttgtgtgcgcggcagtgagcaaggtgtttgatatttttgaaaaggataagattttggagcatgtccgggagctcactccttatctggaggaaaagctggataagcttgtggctgatcatgattgtgtggcacttcgaaggggcaagggctttatgcaggggctggtgatcgctggagttccagtgggagcggtggtttcaaaagccctggaaaagggcttgctggttatttccgcaggaagtgatgtcctgcgtctggtgcccccgctggtgatcaccagggagcatgtggatgagatgtatgaaatcttaaatacgacgttatcagaagtttgatagtctctttcttctttatctttatggagagggcgcatccttaggggtgcgcctttttcctatattctatccctgtaatttgggtaaatagttaattgatttgggcgattgtgtttggtataatcatcgtacagggctgatgattcaattgggtgctgttgtatatctatttgggcattcgaaattttatattctgcgggtgaaggtgcttgcacacctcagtctaaaaaacatcgctgttgtctctgggaactgcattaagtggaagagtcacagatagaacaatggtcgaaatgggaggataggcatttcggcaactacccataattctgaaattatggctgagaaagtgatatgagaaaatgtataaaaaagcgagaagatatatattgatttttatgatatttagttttatctgggcgctttgggggttttataaagtaaatcagccttatttggataatacaagaaatatagacaagtctcatccgctgacaggccagatcgcaggtcttgcaatgggagtaaaggaaaaccaaaaagttcttattaactatacgaatagtgaagggaagtatagagggagtatctttccggcagcagttaatgactatatgaataaaacagttaaattatatgaggtgagaagcattctttttccggatgaggtgactgtggtaagggggattctgattccggatagaatatctacaaatcttctgagagctaacatatggatgtattttctattacatgcaatcgagatcgatgagcgaagaaggcacagaaggcgttaaagtgccggaaacattgcctgccacgttggaaattgatgaatttttctcaggggcatgttatactgagagaaaaacagcttctccttgagctgtgtccaaaaggacacacaccttgggaagcggaatggatttaagaggaacgcatgaagaagagtttgacagaaggcagcgtgggaaaggcgatgctcttgtttgcagggccgatgatcttgggaaatatgctgcaacaatgctacaacattgcagatacattgatcgttggaagatttttaggtgcgaaggccctggcggccgtgggagcggcatataccctgatgaccttcctgaattccattataatcggactttgcatgggaagcggcgccgtattttccaggtactttggaagtaaagatgagaaaggaatgaaaaaagcagtcataacctccttttatctggtagggctggtagctgtggtggtgaatgtagtggtttacgctgctatgaatctggtgctgaagctcctgcaggtgcccccggaagtactgcctttgatgaaggattatgtggtcgtgatttttgccgggatcctttttattttcctgtacaattattttgcttttttgctccggtctgtgggaaattccaccattccccttgtttttctggcaattgcggctgtgctcaatattgtgctggatattgtgttcgtggtggcaggccgcatgggcgtgggaggagctgcctgggctacggttcttgcccaggcggtttccgggctgggtctggggatctacacacggtttaaggagccggagctggggccctggaaggggaaggaacctataaccagagagaatatccgggagattttccggttttcagccaccacctgtgtccagcagtctgtgatgaatctgggaattttaatggtccaggggctggtgaacagctttgggaccgcagttatggccgcctttgcggcagcggtgaaaattgattcctttgcttatatgcctgctcaggaatttggcaatgctttttccatttttgtctcccagaattatggggcgggaagaaaggaccgggtccgggagggcgtgagatttgcggtcaaggtgtccacaggtttttgtctggcagtatcggctgttatctttgggacagcaccctggctgatgcgtatttttatcagcgggagggagacggagattattcatattggggcgcagtaccttcgggtggaaggggccttttatgtggggatcgggatcctgtttttgctctatggtttctaccgggcagtggagaagccggaaatgtcagtggttctcacgattttgtcccttgggaccagggtactgttggcctacgccctggcacctgtgaaatggatcggtgtgttgggtatctggtgggccattcccattggctgggctttggcagatgctgcggggcttgtgtatatgaagaaaaagaaattgcttgcttagggaaaaggtccgtcattccagatgagatttgtaacaaatacacatagggtgcgctgggcggagcgggagggtgtttggtgaacaattcagcactttttgcaaggtatccggcaattttctctatgtactttggaaaatatctggagtaaactaaagatagttatggagtaaaaactttgctgtggggaaaggatgtagaaaaaatatgaacaactgtattacaatggcaaaatatcatggattggggaatgattatttaattctggacccaaataaaaacccggtgcaggtgcagggaaagaagattgccctcatgtgccagaggggctttggactgggagcggacggcgttttgtacgggccggtgaacatgaatggtaaattgggagttcatatttttaactctgatggaagtgaagtggagatcagtggaaacggagccaggatctttgcaaaataccttcttgaccagcagtatgtgagagaatcgaaatttgccattgagacactgtcaggctcacttgaagtggaatgtctgaataagagggggacggagtttcgggtaaatatgggtaaggccagctttttgtccagggagatccctgtgacaggggagatccgggaggttatcgatgaaccgttcacctttgacggtaaggaatataaagccacctgtctgtctgtggggaatccacactgtattatcttcatggacaacgtttcagaggaaactgtgcgttccctggggccttatgtggaaaatgcagaagagtttccaaaccggatgaatctgcagatctgccgtgtgatcgacaggggcaatctggatattcagatctgggagagaggctctggttatacccaggcttccggtaccggaagctgtgcggcagcggcagcggccttccgccggggaggtatggagagaaggatcaatgtaaatcagccgggaggtatgattcagattgatattctggaggatgatactatgctcatgacaggaagcgtgggttatgtggcagacttgtctgtggcacagagttttttctcataaaaattatttcctcttaaaaatcagcacaaaagaatatacaggcccatatatttttggaagacatccggaatgtatgggctgtttcattgtgtaggttcctttcttgaacttgccggcggaagaaataccctttgaaggggatgcacaggagggctggcgtgggccgctccgcaaaattgtttttagttaaaaagagcacggtactgttccagagcgcaaagctgctggggggtgagagctttggggacggtgaggtgcaggcgcacgtactggtctccccggccgcccattttcttgggacggatcagaccccggtttacaaggcgcaggggctgctccagagtagttccgggagggatgtggtataccagatctccttctatggttgggatggtcacagggccgcccaggaccagggtgggataatctatctgcaggtctgtgtacaggtgatagccctttctggtgtatcctggtttttcccggaggaggacgatgagaatgtacagcttgtcctggtgctccttttgaaggaagaaatctgtgtcctggaccacctggtccttgagtacaaagaactggcgttcataggctcctttggggatctttacctgaaactgccattccttttgaatggtgcgggaaccttggcatgtgggacatttctccagggcgatctttccggtaccatgacagcggttgcagaaggattctctgggggattttacaccccagcgcatttcgtagatggttttccggccttttccattacaatccgggcaggtggaatggacgatctttccgtgggctccctgacaggtggggcaggggattttctcagtataaacggccgtggcttgggtgtccttcaaagtatcctccaggtccagccaggccaccatgcggatgctttgagggggaggggcttcctcttttggcggtttgtttttgcaggctccacagtgaccatcctcctggtcctttgactggctgtggaaggcggagcggtaggctgtactttggcggtaggccgcatgacccatgtagtcgtactgtctgcgctgctcctcatcggacagagtctgataggcctgggaaatttcatggaatttctttgccgtttcctcatcggaggaggaagaatccggatgatattttttggccagcttccggtatgcggccttgatctctttttgggaggcatcccgggagacgcccaggatgtcgtaatagttagtcatgggcatcctcctttaaagtgtactaaaatagtatgatttcatatatctattttacaccattctatggaaaaatacaagactaaccagggcagggaaaataatagaattgtgcactgagtggattagaatattttagtgctcctcatactgagtgggagaagattgcgggaaactgagttctggaatatgcgtttttggtataagataaatttgctatgtgtgtttgtatatcattatgaaaccggtctgccctgggctgcccaaacgttgtttcaatataatctgtaatatcagttatatcataaatggcctcccaggtcataaggattttatacgcgggcattttttcttgcatttctcaattctgtgatttttttgaaagcatcttccaacggcaattctctgccggcctccatatcatcaattcccctgtcaagtttatctaagaaagatttctgttcctgttgaaaatcggtctgtttattttgggtatttaatttcatagaatcactccattcctatggcttcatttatactctgttcagtctgtaaatttctaatcttagtttatcatagaaccagaggttacgcaatgtgtagctgcgaagcagctttcctatgcaataaatagagcacaccctcgcccctctgtttttccctggaatcaccggggctgtcttgtttttttagaggggttatgctattgtatatcatgtcaggcgcgccagcgccatggccccaaggtccctgagatatgggaaaccccagtgggcagaacatatcttccgctgcagaagctgcagatttaaacggaagatcagtattcaaaacaataagaaagagggtgaagctatggttgagttagaccagttcaaaagcattttgaatacttatacagaaccattagtggaagtgagggattcactttgacttggctaacaaggaaaagcggatcgaagaattagagagggagatggaagctcctgatttctgggacgatgcagaacgctcccagaaaatgatgaaagaattaaagtacatgaaggatgacctggagacctacaacaacctggtgaggggaattgaagacatggagaccatgatcgagatgggatatgaagaaaatgacccgtctttaattccggagatccaggaaatgctggatgagttccagaaaagctttgatgagatccgggtgaaaactctgctttcagaggaatatgattccaacagcgccattttaaagctgaacgcaggagctggagggacagaggcctgcgactggtgcggcatgctctaccgcatgtacacccgctgggctgacaaaaagggattttccctggaggtactggattatctggacggagatgaggcgggtatcaagtccgtgaccttccaggtgaacggtgagaatgcctatggctatttgaaatccgagaagggtgtccaccgtctggtgcgtatctcccccttcaatgcagcgggaaaacgccagacctcctttgtatcctgtgatgtaatgccagatattgatacagatattgatattgagatcaacgatgacgatatccggatcgacacctatcgttccagcggcgccggcggccagcacattaacaagacctcctccgctatccgtattacccattatcccacgggaatcgtggttcagtgccagaatgagcgttctcagcacatgaacaaggataaggccatgcagatgttaaaagccaagctgtatcttctgaagcagcaggagactgaggagaagctcaacggcatccgtggtgaggtgacagagatcggctggggcaaccagatccgttcctatgtcatgcagccttacaccatggtgaaggaccacaggaccaatgaggagacaggaaatgtggacggtgttctggacggagacatcgatttatttatcaatgggtacctgaaatggaaagccctgtccaaaaagaccttgcagaaataggtgggatatgctaatatatctttctgagagaaacaaatgtcctcaaaataaagacagaaggataaaaagcatggaaaaagaaaagaaaaagtatttcgtggtaagggaaaaggcggttcccgaggtcctgctcaaggtcgtggaggcccagaagcttctgaattctggaaaagtggatacggtccaggaggccgcagaggccgtggggatcagccgcagttctttctataaatataaggatgatatttttccattccacgaggaggcaaaaggaaagaccatcactttcatttcccagatggatgatgagccggggctgttgtcagcagttctccaggccattgccaagtatcacggaaatattcttaccatccaccagagtattcccatcaatggggtggccactttgactttgagtgtggagatccttcctggagaaggggacgcagaggccatggtggaagaaatagagcaaagtgacggcattcactatttgaaaatattaggcagggagtaaggtacaatggtaaatattgcagtattaggatacggtacggtaggaagtggtgtggtggaagtcatcaacaccaatcataagagcattaataagcgggcaggggatgagatcaatattaaatatgtcctggatctaagagattttccaggggaccctgtgcaggaggttctggttcatgactatgagatcattgccaatgatcctcaggtagatattgttgtggaggtaatgggaggcattgagccagcatatacctttgttaagagagccctggagtccgggaaaagtgtatgtacctccaacaaggcgctggtggctaagcacggccctgagctcatgaaactggctaaggaaaaagacatcaacttcctttttgaggcaagctgcggaggcggcattcccattatccgggcgctgaattcttctcttacggcagacgagattgatgagatcacaggaatattaaacggaaccaccaactatatgctctataagatgagcaccgagggctgctcctttgactctgtgctgaaggaggcgcaggccaaggggtatgcggaagcggatcctacggcggatgtggaaggctatgatgcctgccggaagatcgccattttgtcttcccttgcctatggaagatttttagattacgagacgatctatacagaggggatcaccaagatcactccggaggatatggagtatgccaagaagctgggaatgaccattaagcttctggccaccagcaagaaattcggcagcaggttctatgcgatggtagcgcccttcctgctgggacagaacagccctctgttcagtgtaaatgatgtatttaacggagtcttcgtccatggaaatgtgctgggagacgccatgttctatggaagcggagccggaaagcttcccacagccagcgccgtggttgcggatgtggtggacgaggcaaagcatcttcacagaaatatcatgaccaactggagcagcaagcctttgaatctgatggatctaaaggaggttcagggacggttctttgtgagggttcagggaaatccttatgaaagatactgtgaagtgaaggccgccttcggggatgtggaacctatcctggtggaaagtctgaaaaacgagttcgcctttatttctccggttatgacccaggaggagtatgacaagaaatctgctgcccttaacgggattattacaatgatccgcgtaaaggactgatacaggcagaaaagagagctgctgtccactggatgacccacagcgtgttttaccggatgaggccggtgagcggcggcaaaagaggagcaaggattatgaaatatgtggtaattttaggagacggcatggctgacgagcccatcaaggagctgggagacaaaacccctctggaatacgcagatacagccgccatggatgagctggcagctatggcggagattggcttggtgaacacgatcccggaagggatggcgccgggaagtgacacggccaacctgtccgtgatgggatataatcccaggaagtattatacaggccgttctcccctggaggccttgagcattggggttgacatgaaggacacagatgtggtgtatcggtgcaatcttgtcaccctcacagaaaaggttggatcctaccaggagcaggaaatcctggaccacagctctgacgagatcagcacccaggatgcggcggtgctgttccgggaggtgtgtgcagagctggcagatgagacctatcagttctatgtgggaaccagctaccgtcactgtatggtatgggatcagggagaagttctggagctgaccgccccccatgatgtgctcacccagaaaatcggtccccacctgcctaaggatgcggtgctgcgtcgtatgcaggagagaagctacgagattctcaaggaccaccccattaatcaggaaagaaaggccaagggcttaaaccctgccaacagcttctggttttggggagccggaaccaaaccggccctggattcctttgaagcgcttcatcacaaaaaaggcgtgatgatctctgcggtggacctgctcaagggaattgctgtaggcgccggaatagaaaacattaccgtggaaggggccaacggaggccttcataccaattatgaaggaaaagcccaggctgctgtggaggctcttacccaaaagaattatgactttgcctatatccatgtggaggccccggatgaaatgggccaccagggaaatgtaaagaagaaggtaaaggccattgagtatttggattccagagtgatccgtctggtaaaggaagggttggaccaggctggtgtggattaccggatgttgatcctgccggatcatcccacccccattcgcgtgagaacccatgtgagtgccccggtgccctatctgctctatgacagcacagctccccagaagagaagctggtcttacaatgagcgggaggcagaacagggaggcgtgcgcatggagcacggctgggatatgatgtcttatctcttttccaaataagaacaagcaggggagggctttggatgcctgaggcagaaaaagccttcctgattacatataccaggaggaagctatgttaatagtgaaaaaattcggcggcacctctgtggccaacaaagaaagaattttcaatgtggccagaaggtgtatccaggagtatcaaaaaggaaatgatgtggtggtcgtgctgtccgctatgggtaagtatacagatgaactcatcaccatggcacaggatatcaatgaaaaaccgcccaaaagagaaatggatatgctattcaccatcggagagcagatgagcgtgtcacttatggcaatggccatgaataagctgggagtgcctgcggtatctcttaacgcttttcaggtggccatgcataccaccagtgtatatggaaacgccagactgaaacgcatagatacagagcgcattaaaagcgaactggaggccagaaagatcgtgatcgtcacaggcttccagggagtaaataaatatgatgactataccacccttggacggggcggttcggacactacggcagttgctctggcagccgcccttcacgcagacgcctgcgagatctatacggatgtggaaggaatttacacggcagatcccaggattgtgccaggcgccagaaaattaaaggagatcacctacgatgagatgctggatctggccactttgggagcgggcgtgctgcacaaccgttcagtggaaatggccaaaaaatacggggttccccttgtggtgcgatccagcttaaatgagtccgaaggtacgattgtgaaggaggaagtgacagtggagagaatgttgatcagcggggttgcgctggataaccatgcagtgaggattgccgtgataggagtcaaggaccagccaggtattgcctttaaggtatttgatacccttgccaagaaaaatataaatgtagatgtgatccttcagtccattggacgctccggaagcaaggacatctcctttaccgttgatgaaaaggatctggaggatgctgtggaggttctcaaggagaaccagtcccgccttacctttaaggagattcaggcagagaagaatatcgctaagctttccattgtgggagctggcatgatgagcaatcctggtgtggcggcgaagatgttcgaaagcctgtataatgaaaatatcaatattaatatgatctccacctctgagattcgggtaaccgtgatcatcaacaaagaggagggagagcgggccatgagagctgtccatgacgcttttggcctggctgaataaggatatctgataaggtgcggaccatattggttcccctgtggtgtggtatatgaaaaagggaatgtatcccggcagaggtttctgtcggggaacattccctttgttttccatatctgtcccttgtatatcaggggaattcccggccttcatactggtacagtacgccgttttgtgtataggcatcctggctcattacaaggccgaagcagatcagtgcggccaggaagcccaatactactcctgcaatggaaagtcccaggcccaccttggcaggggactgcatgggcccgtttccccgggacaaaaaagccataagaatcccgaagcctccgaagatcagtcctcctattcctgcacacacacaggtgagcagggagagaataccaagcaccagggaggcaatggccatgccgtttacaggctggttttggttgtgggagggaccccggtcatagcgtccataaggttcctgaggcgggtatggcggaggataggcagcttccggtcctccctgaggataggggccgtggggcacaaactggtcatggggaggcgctgcgttgtatggaggataactgctgtgggaagtctgtgaatcctcatcatgattctgcactctgccgtgagtctgtggatactcgtcaggattctccatactgccgcaagcttgtaccggagtttcactggggtttgtaattatgggagccgggctggttccgtagtaggattccctggaggaaggggttccggtgtcttgttctttagagtccataggatttcctcgctttcttgctcacaaataatcagaacattttcggttaccgtctttttgggaggatacaaagtatcctgcgatcggatcaaaaaaacagcaactttattttatcatgggcagggaaacctggcaagccgtggtcttgacaaattcggttgacattgttattgtaattactgtatttgccgttgaagagatggatgaagcaggaagcccattggctttataaaaatgtggagctcactggcagcaaatggacttacataacagccgcttctataaaagaggcggccatagaaataattctctccagtgcgagggaggatgcaaggagacaggatatggatattatacaggcagtcacagaagaacttgaagtgaaaaaatggcaggtggaagctgccgttaaattaattgacgagggcaacaccatcccctttatttcccgttaccgcaaggaggccaccggctccttaaatgatgagcagctccgccgccttcatgagcgtttaatgtacttaaggaacctggaggataagaaaaaccaggtgctttgcagtattgaagaacagggaaagcttaccccggaactgaagaagcagattttggatgcccagaccctggtagtggtggaggatctgtaccgcccatacaggccgaaacgccgtaccagagccaccatcgccaaggaaaagggactggagcctctggcagacatcctgactcttcagatgaccaaggtaccgcttctggaggaagcccaggcctatgtgtcagaagaaaaggaggtaaagacgcctcaggaggccctggacggagccaaggatattgtggcggagcgcatttctgatgaggcagattaccgtatttatatccgtgaccgaaccatgaagcagggcaccataagctcagcggctaaggacgagaaggcccagtccgtgtatgaaatgtactaccagtttgaagaaaagatatcgaaggtggcaggccaccgggtgctggccctgaaccggggagaaaaggagaaattcctcaccgtaaagataaatgcaccggaagaagacattcttcggtacctgaataaaaaagtcatcaccagagaaaatcctttcacagcccctgttctaagggaggtcattgaggacagctacaagcgcctcatcgcccctgctattgaacgagagatccgcagcgatctcaccgagaaggcggaagacggagccatcagtgtatttggaaaaaatctggagcagcttcttatgcagcctcccattgtaggccatgtagtgcttggatgggatcctgcctttcgtacaggctgcaagcttgcagttgtggatgagaccggaaaagtcctggacaccacagtgatctatcccaccgcccccaccacggaggcaaagatcaaggcagccaaggaaaccttaaagaagatgatcaaaaagtatcatattaccttgatctctgtgggcaacggaaccgcatccagggaatccgagcaggtgatcgtggagcttctcaaggaaattccggaaaaggtgcagtacatcatcacaaatgaagcgggagcttccgtatattccgccagtaagctggccacagaggaattccccaactttgatgtgggccagagaagtgcggcctccattgccagaagacttcaagaccctctggcagagctggtgaagattgaccccaaatccatcggtgtgggccagtaccagcacgacatgaaccagaaaaagctgggcgaggccctgggcggcgtggtggaagactgcgtgaataaggtgggagtggacttaaataccgcctccgcctctctgttggaatacatttccggtatctcaaaggtgatcgccaaaaatattgtggcctaccgggaggaaaacggacgcttccgcagccgccgggagcttcttaaggtggccaagctggggccaaaggcttttgagcagtgtgcgggatttgcccggatcaccggaggggacaacccgctggatgccaccagtgtccaccctgagagctatgaggcagccatccgcctgctggaaaagctgggctataccccggaggatatcgcaaaaggcagactatccggaatctccaagcaggtgaaggactataagaagctggcccaggagcttgaagtgggagaaattacccttcaggatattgtaaaagagctggagaagccaggcagagaccccagggatgagatgcccaggcccattctgcgcacagacgtgctggatatgaaggatctgaaggagggcatggtgctgaaggggactgtgcgcaacgtgatcgactttggagctttcgtggacattggggttcaccaggatggtttggtccacatttcccagatcagtgataaatttattaagcatcccctggaggcagtgagcgtgggggatgtggtggacgtgaaggtcctcagcgtagacttggagaaaaagcggatcggcctgaccatgagagggattcagcagtgatgatgcacagaggggatattttctgatcctggatctctgcaggagatttcccttataaattccatatttttcggagattttaggctgtttttatacatttttatagaaaacctgtttcaccccacgaaaagtgttggtgttacaggttttttaatttataatggtaataacggatagaataaatagaaaggggagggcacaatgaaaaaaccaaggggaaaaaaggtaactgctctgcttctcgtcctgaccatgctgctgggggagagtacagtactggcccaggaagagctgcctgcgggatatgaggagtccttggaaaatactgagaaccagccggagggcggccaaagtctgtttcaggatgaacaggcttcttttggcagtgagggaagcagtgaggagcttccttcgcaggcagacaaggaagtgccggacagccaggagctctttacagctgaccaggaggtctccttggagctgtttggagaggatgagactttccgtcaggcgggagaggaccaggaggtcttgtccctggataagcagatgatcacccaggtgttctgggactggaggctccaggattttgtgaaggaaaactatgacctgaacaaggacggatatcttacctcccaggaacgtcttttggtgactcagatggacgtgtctggcctggggatccagcgtttggacggaattgaaatatttgaaaacctacaaagtctggactgttcccgcaatggactgaagaccttggagcaggtaaaaagccttacgggcctgaagtatctggactgttcacaaaaccagctcacccagctggatacagcccgaaacgttctattagaggagctggactgcagccagaaccgtttggccagtcttctggtggaaaagtccctaaagctgaaaaaactcaactgcagccagaaccgtcttgtcagctttgtgctggaccataacgaaagtcttcaggagctggactgctccggtaatcagcttgtgggtgtggatgtgagaaactgtcccctgaaaagcttttcctgggaaaataacgttttttacacaggagccgtccagtggggactggaggagtttcctcagctttttacagagacagtcaccggatttgacaacctgaaatggaaggataaccacaccctggagatggaagacagtacccgggatgccaaggtctactgtactctggagagtataggcaagacgtggaatgtggctttttccatccgcaccggctattttcgggaaaaggattttgcggacagccgtttcttttactatctgctaaaggaatgtaagaaaacctcagagggtctgctgaccatggaggaccttgcccagatcacccaggtatccatacctgaggaaggatacagccagattccggagctgaagtatctggtgaatctgaaggtacttgactgtcagggcaattccctggaatctttagatctgtcctcctgcatggagctggaggaggtgaattgttccaagaacattggattaaaggagatcctgtggagcaaaagggcttatgaaagtctggtcagggtagaggctgcccaatgttcccttacggagatctcgctggtaaatgcgcctgctctgaaggtactgaatgtgaggggaaacgaccttacgctgctccgcctttccggtttttcttctttggaggaggcggactgcaggtttaacaacctgcaggagccggtggaaatggaggggataagtcctggtgtgtgcatcaagtctccaaagaagagctatgaggtccagaccgggccttccaactggttttccttccaggagctgggagattttcagaaggatatgaagacttcagaggaaattgtaaacccctctgggatgagtattgactgggagaagaatggctttgtggtaaatgcctacagcggcagcagccgtgttgcgtctttttccataagagaccgggagacaggagagattatgggaacctgccaggtgcgggcgtcccttcagccgggaagcggccaggctctgcagcttgccgtacccaggctggtgaagctggaaactacccagggaatgactttgagctggaataaggtgaccgatgcatccggatacgtggtttaccgtaaacagggaaacggacggtggactcttataaaaaccctgaacgggacccagagcagctacacagacagcaccgctgagctgaacaagagctatacctataccgtgcgggcacggtgcgtgataaaagggaagacgattcttagcggttacaacaaaaagggccttaccggaaaaatcgtcctgaaggccccggtgttaaaacctttgaagcagggacagcccttggtggtggaatggaatgccgctgcaggggcagatggttattcggtatttcggaaaactgacggaaagggggcttggcagcggataggagtgacggacagcaccaccctttggtttgaggatgccgcatggcccaagcattcctacacctatacggtgagggcctttaagcggatcaatggcaagatccgctatggagcctatgataccaaaggtgttgcagctaaggccctgcttatggaagggcagttccggtatatgaaaaagaaggagagccaggtggagatttactggtatcagcgtccttacgctaccgcctaccagctttaccggtcagagtccagaaacggaagcttccgtttctttcaagaatatgcaaaggacggaaaaaataaagccactttgaatgtatcccaggttaatggatattattttaaaatccggccagtgtgcagatatgacaacaaaaccgttgtgggaacctttagtcaggcgaaatccatgcaggagctcatcacctatgaacttcctgcagcctatgatttttcagaataccagcttgcctatgagacaacagcgggagatgggatccgttttgactatagtcttcgtgacggcggaaatttccttatgaccgcagccgccatgactgcgtggaagtccccggtcatggaatatcaggcgccctatccaggttcctatgcagaaacctatattccccaagataaggaggctgcctttcatctgcaggaaatgctggtgcttcccgccaggtcctctgcgggggataaccaggcggtaaagcaggcagttatgacctatggagccgtgtatgcctcttattgcgacaaagatgaatattccaatgaagacggaagctattattattccggggatccggaaatgggggcggaaaatcatgccattgtcattgtgggatgggatgacacctattccagaaagtactttaaagatacccctcctggagatggtgcctttttatgcaagaatagctacggaagaacggaaggaacggacggctttttttatctttcctattatgaccccacgctgatgaaaaacagcaacgcagtggtcttttccggaatggaggcaaagaccagctacggtaaaatttatcagtacgatgagctgggggcggtcactgcctatggaaccgggaagacggcttaccaggccaatgtatttccgggaaaaagaggcctcacccagagcgaaaatctgcaggcggtctctttctatacttatgatgcaggttatacctatgaggtatatgtggtgacggattataaaggggaagagtcccttgagaagctgggaacccctgtgaaaaaggggaccatggcctatgcaggatatcatacagtgactctgacggctcctgtgaagcttgccaaaggcagccggtttgcggttgtggtgaagcttacgggcaataagacggtatatggctgtgtggaggctcctatagccggttattcctcaaaggcatctgcatccgttggggaaagctttgtcagcggcaatggaaaagactggacggacatgacggagatactacagaacaccaatgtgtgtgtaaaggcatttacagatggcaggggagaagacggaagcgtggaacggcagggaacagaggcagctgcctattcgccttcagacctgtctgccaagggatttgtccttaacgcgtctgccatggacagggggcttcagggagacctgatcccggttcctatgacctttggaaatacgaagccgggaaaaagtgtttcttgtccggctcagtatgatcttcgggcatacgcccaggtcacaaaggtgaaaaatcagctgagcatgaatacctgctgggcctttgcggctcttgcttctgcggagagctgcctgttaaaaaagcagggataaaaccaagggaaaaatattaaagatttctaaaacaaccatcttttcttgtgacgagaggaattatgtgatattatgaaggaaaaccacggaaaaatctaataattatagagggtaaggagacgtgttatgggcaaaaaggttttaaacgggctgctctttgtggcagtggtgggaatatgtattggattgactctttacttaggccagggagccgttgaaatgacagtttacaatttcatcttcctgggagtcatgatcgtgatctacctggcaggactgctgggtggaatgttaaagatgaaccatttgggaagtgacctgaacagggcaggggccggacttgaagactatttcaagacacccggatccaaaagcgagaagctctctgccagactggaaggacttttcagccatccctatctcagcaggaaaatgaagaatttcctcctgggaatgaagaaaagcaaggaaggcattgtggaccttgaggagtacataaacgaagacgaactggacaactacattcataagcgcatgctggaaatgatcccggacattctcacaagcctgggtatcctgggaacctttgtgggtcttgtctggggcttgaagaattttgaaccctccaactatgaggccatgacaagctctgtggcgtctcttgtgggcgggatcaaggttgcctttttgacatccatttacggtgtgtccctgtctgtgatctacacctttggcatgaagtctgagtattctgcaatgacggaagagcttcaggatttcctgggaaggtttcacggttatgtcatgccttctgcagaaaacaagtccagaaatcttctggtagccacccagaagcagcagacagaggccctcacacagatggccggggatttttcctcccagatggcagagcaattcaaccagatgctctcccccacctttgacaagatgaacaatacgctggaggagctggctaattctgtgaccacgtgccagagagaggcagtgaaggaaatcgtggacaccttcctggtggaaatgcacaattcctttaagatggagttccaggactttggtaaggctctggaacagctcaccaaggttcagagagaaagtgcagaatatactcagaatctctatagggagcttacggatgaaatgaaggctgcctatgcggagcaggagaagaccatgggtgctatgatgaagactctgggagaaacccagaatcagtatctggccgccgccggtgagatcctcaaggaaaataaagccatccaggagaagcagcaggatgattaccaacacctggtggactatctccgggatgcggaaaaaacctctgccaagttctgggtcgcctgcaaccaggcaatgcagaaatacgtggaagccgcaggagacggcgtggacaagttcggcaaggtgggccagcagtgcgcccagcttttgaaatccaatgagaagcttgtggagagctttgaagagaagatccgtgagcttacagaataccagaagatgtcttacaatctcatgaatcagatccggcggatcttaaacgatgtgactgtggtcaatgaggagaaggacatttaccttatgggcggacatatcaccagcctggcagctcagaatgccaacaaggaggctatggagcgggtgaaggaaatgctggaggagcaggcttcccagcagaaggagcttttggaggaaatgaaccgttccattaaagaaatgcccaaaggcggccagaaaggcaaattcggattatttaaataggagaacaacatgcgcagaagaaaatcggaaaacggcggatttaatgtatggcgctcttactctgacttaatggccggagtcctcctgctctttgtgctcatcatgtgcgtgacactttttcaggcgcagaaaagctacgatgagagtattcaggaacgagatgagaagattgctcttcaggaacaatatactgcagaaattctggctcagcaaaatgccctggaggaacaggaagggcagatcaagaaccaggacgaaaagctgaaaactcaggaggagcttcttgccgagctggcagccaagctgaagaagcaggagagtaccctgaatgcccagcaaagcgccttggatgagaagaccagcctgctcaaggagcagcagcagaaaatcgacaacatcatcggagtaaaggcagaagttattgaatctctgaaaaacgaatttaaacaaaacaatgtaagcgtaaatattgatgcccagagcggtgctatgaccctggagtccaacgtgatgtttgattacaacgaggcggagctcacagaagaaggagagtcggttcttcgttccgtccttcccatatactgcaaggtgctgctggaggacaagcatctcccctatctggctgagatcatcattgatggttacacggatacggacggggactacagttacaacctggagctttcccagcagcgttccctggccgtggcccagtatctgctttccatatctgcagatttccttacacaggaacaacaggcccagctggaggacaatctcactgtaaacggacactccatgtcaaatcccatcctggatgccaatggtaaggtggatatggacgcctccaggcgtgtggaagtaaaattccgtctgaaggatgaagaaatgattcaggagctgcagagcatcatgagcgaaaattcataagtttcataagaatacacccaggaggacagccttatgcatagggctgtccttctgcacctgacgggcagaagcaactaggagctggccagtggaaagactgttcttctgcgccttcggcagatttgtgtgccaggcatcccagactgggtcctggcaagaggcgaatcagtgttttgccttggaacgttaagtgataagagaaggagtaagatcaatgaagagaatctatgatattggaaaagagctgttttctagtcctgtttacccgggagatccggcgcctcgcaaggagtctttcctggagatcggtgaggattgtccctgtagtcttaccgtgcttactatgggcagccacaacggcacccatctggatgcgcccaggcattttgtccgggacggggccggagtggatgaaatccctctggaaaagtgcatcggaccctgtaaggtggtgtccgcctggggagagatcacagaagagcaaatggaggcgtggctggctgacaaaaccaaaaagctgctgatcaaaggagacattctcctcactccaccggcagcccgggtgatggcccgctgccgcctggacctggtgggcgtagaatcccagacggtggggcagggagaaacccagaccagcatccatcagatcctcctgggcgcccaggtggtgatcctggaaggtttggttttggaacaggtccaacagggaatctatttccttgccgcccagcccctgaagatgtccggcctggacggctcgccggtaaggccagtgttgtgggaaatgggaggtaatgatcgataacatatcctgcggcgcttttgtccgtctcctggaaaaagagattgtatatctaaggattgtactttataataaaaggaagagtaaaatccaggaaaaggtgggtgtatcatggataaaaatgagattttggagaatgatttgtttgaggctttttcagtggcttctgatcatgtatacatatatgtctgcgatgtgaagacaaatttatctcgttggtcacccaatgcagttgattattttgatatgccgcaagagtatatggaggatgtttctcccatttggatccagcggattcatccggatgacaggggaaaatatcaagaggatattgaaggtgtgttttcgggaaaaagccgcagacataaatgtgagtaccgggccatgaaccggtacggagattatgtatggctggagtgcagagggacaatgatttatgaccaggagggcaggcaaaagctttttgcagggatcatgacccgcctggatgcaaggaataagtacgatcctctgacgaatctgaaaaccttctatgaatttaacaattatgattttcatcagggcactggttctgttctgctcattggagtggatgacttccgggaagtcaccaacaattttggatacagctatggagatactgtgttggcggatttcagcaaaaaaatattggatttatgcactggtgaccgggaagcataccgattggagggagatgaatttctcatcctttgtccaggagaaggcagacaggagacagaaacgctttttggggaattaaaagaagccgcaaccggtcttggaggatctagaggaagacggatcaatctgaatttttccggaggtgcggtgttatatcccagggatggagtgaagcgggattatttgatcagcaatatggagcattccattgaacatgcgaaaaaatatgcaaggggaaagcttgtgtttttttcaagggatattgcccaaatgcataatcataccattgaagtaaagcaggcattgtccagggatattgaaaatggatttgaagattttgaactgtattatcagccattggttactaggaaggaccacaagatcaaatcctgtgaggccttgctgcgatggaaaaaacagacacagctgcatgtgtccacccaggagattgtcaggcttctggaggagagccaggagatcaggaaagtggggtgctgggtggcagagaaggtgttttgtcatgcccagtggtggcagaaggagttcccagagcttaccgtgggatttaatgtatcggcagttcagtttcaaggaatggattttgtgggatttttgattgataaagcaaaggaatggaacctgcggcctgacaaaattaccattgaactcacagaaagttctaaggtggaggattttaattctatggcagtgaattttaagaaactcagggattttgggtttaaaattgctttggatgactttgggattgcctattccacccttttgcttgtgagaaatctgcctacggattatgtaaagatcgaccattcctttatcttgaatttaacccgggacaatgtggtggacctggcgatcattgagactgtgatctccctgtgcaaaaagctgaatatccaggtaattgctgagggaattgaaaataaacagattctttccataatggaacaatatccggttaccatgcttcagggatattattttgagaagcctctgaaggaggaggcgtttgtgaagctgttaaaggggcctgtgatgcaggcggttttgaagtaagaagaaaaagaaacagcacgaattcattacggggctatgtaataaaaaggactctgcaggcagcagccattttgcagagtcctttttatatgtgtgcaatggaaaatgttaatccagatactccctgttaacataaccgtatttatccagcttggaggaatacacgtaccagtaggtggaatcatcggtatcgataacctggacagtgtcaccgttatacagctggccgatttcatttgaattatcgaagcttctggaggagcgcagagccagataacctttggccacatgaaccgtttgtgagggataagagcttccgccggagagataatccttgttcacatagccatatttatcaagcttagccgagtatacataccagtaagcagaatcgctggtatctatgagctggacagtgtcgccgttatataattccccaatctcatttgaagtatcgtagttcttggcactgcgcagggcaaggtagcccttggatatacttaccgttctggtatctccggtggttacactttccaaataatttttgtctgtataaccatatcggtccagcttggaggaatacacataccagtaggtggagtcgctggtttccagaacctggacggtgtccccattgtagagctgcccgatttcgttcgatttatcatagcttttggcgcttcgaagagccagatagttcttatctacacggacggttcttgtatctcctgtacttcttttgtttgctactatcagatagtctttatttacatagccgtatttatcaagctttggagagtacacataccagtaagcggagtcactggcatcgtaaacttcaacggcatcaccgctgtataattgaccgatttcattacctctgtcaaagcttttatctgtgcgcagagccagataacctttggccacgctcacggtccaggaggaataggaggattcaagggatattaaatggtctttgtttacataaccataccggtccagcttaggtgaatagacataccaataggtggagtcgctgtaatcagttactgagacaatatccccggaatacaattctccgatttcattatttttatcaaagcttttatctgtacgaagagccagatatccagatgacacgctgacttcataggtgtcgccaaaggccaggctttgttgggcagttaagggcacagagagggaaaaaacaactgtcaataagataaaccatttaaaaatttttgattttaatgaaagggctgttttcatttccatagtgttcctccttaaaaatagttcatagattgcttaggtaccatcaattttgttgctgctatttgttatagtagtcgtaaatctgtctgctgatggaagcgattgtattttgagcagctccggcctcgctcaggttttctgacataaaaacaaggatcaggtcattgagttcatcgtagataattcctgcatcattttccacatctgagagctcaccggttttattggcagcctttactccgtccggaagctgagcggggattttgttgcgtagtgtctgctgggacagcagggagagcatggaatctgcatggggatattggtcagagtcgttttcgtaaagggctttgagaaaatggccgcagtccagtacagaagtataattatctcctttttcattgcctgccagcagcaatctccccatactggtggctccatagctgtgtgccaggcaaaaatcgttgacaactgtcattccggcagaaggatcaccatccccaagatagtttaccagagtatttgcagcatcattatcgcttaccgtgatcatggaagagagataggaatctacggcatctttgtcatattgttcagtgagactttcgtaattttcgtacacagctcccatgatatatagcttgatcaggcttgcggactgcatgcggcgggagctgatactgccttctgtatcattttccaggtcgcagatatacacggaccagcttccgttttcagcaggtaaggagttctgaacctgggtgagcaatgtctggagcttttcgtcagtgaccgtttcctttgctgtgtttttgctgaaaatgctgctttgggatgattttgatgacggggacagcattccctcgcttcccggggattctggctcaggttctgcagcataacagggaatggatgacagcaggctgaaaaaaacagcggagattattaaaagtatccggaggttcagccacaaccccgctggctttctctgcttggtcaaaagttgcattttttatatcctccttccattgggttttgtattggtctggggtgtatgaaattaagaaatataaggatatttctgatatttcctattataaaggtttctaattctgatatcaagcttataattgctaagaaaaatattaatgttttgtaaaagaagcagcgtgtacaaaaatttaaaaatctcttgaaatgaacctcacaagggtttataatacttattgaacaaaaagaaattcttcggggcagggtgactgatgatcagaattccctaccggcggtgacagtccgcgagccgtaatggttgatttggtgaaattccaaaaccgacagtatagtctggatgagagaagaaggtgcgatgtgaatgtatactcgtatttacgccccggatatttagaagatatccggggttttcttcgctttttggaaatgttatttcctgatgcaagaatttccttttggaagaataactgctttggcaggacatcaaaaaggagagaaacagtatgagtgaacaagtgttgaaacgaacgcaggtaaatgaaagaagcagggtgcgcactttggtgcaggtggccatgctgggggctgtggcaggggttctcatgaatttagagtttcccattccctttttagctcctggtttttatcagttggatttcagcgaggttccggtgctggtggggacttttgccatggggccggcagcaggcgtgctcattgagcttgtgaagattttactgcacctggttaccaaggggaccaccaccgcaggggtgggggatgtggccaatttccttatgggttgtgcatttatacttcccgcaggattgatttaccgcttccatcggaaaaagaccaggaatcatgccattgtgggcatggctgtgggaactgttactatgacagtatttgcctgctttgtaaatgcctttgtgcttcttcctatgtacgggaaagcctttggaatgccggtggaggcctttattgaaatgggcggcgctgtacatagcgcggtagacaatctgtttacctttgctgtgttgatcgtgggaccgtttaatgtattcaaagggtttgcggtatctttaattgtatttttgatttataaaagaattcgagtgatattaagaggagactgattttgtgggacagattcatgaggtgacaaagctgacggacaaccgccatgtgaacttgtataacgtgaaggccaccagcgtacacaacacaccggtgaactattttgtggcatccagggcgaaagaagtggaagaattaaagctggtgagcagagaaaataagccggacggtgtgatcgtgtacagcatctatggtgagaacagggaccgggtggttctggtgagacagtatcggtataccctgggggattatatttatgaattcccggccgggctggtggagctaggggaggattttcacacagcggcggtccgggagatggaagaggagacgggacttcatctggagcctttgtctgtgcaggagggctacgaaaagccatattttacaacaatcggaatgacggacgagtcctgcgccactgtgtatggatatgcatccggagaaatcagcagacagggccaggaggacagcgaggagattgagatcgtgttggcagaccgggcggaggtgcggagaattttaaaggaagaaaaggtggccattatgtgtgcttatatgcttatgcactttctggaggaagacaaagagccattttccttcctaaaaaatctgtaagaaaatttaaaattgttatactttgaaaagcggattccgaagaatccgcttttcgtatatataaaaggaaatttctttatataaaaaccagcctgaggatacatacaagaaaccaaggaaagctgggtcacaacgacacacaggcatacaaagccgagagtttatattttcttactataaattaggaactcaatgacagtcagaaaagggttaatgagaatttttctcattaaccctttttttggttgcacatggaaaataaatcctgtattcttataaaaagattagttttaactaactacaaaaggagaagaggattatgaaaaagttcatcaatgggatgtgtgtatttctagggtttcttagtgtggggctggggataatcggcattgtgctgccaattcttccaacaaccccgtttctgcttctggccaccgctttatttgcaaaggggtcagaaagatttcacaaatggttcaggggaacaaagctgtataaaacttatattgaaaacacaataaagaaaaaggaaatgtccagaaaaaacaaggcctctgtgcttggaatgatcaccgccatgctttccatagggtttcttttatgtcctgtatggtatgtaaggcttttgcttgtggttatcctgatggttcactactactattttctgtttcggatcaggacagcagagaacggtaaatttccaaaaatctgtgaagattaaaggaatggacataaaagaatggatataaagaaaaaacgggaaaaagagaaaaaaatgttagattttatggtgggcatttattgcaggggaaagcataaaggtggaaaagttctgtgtccgcagtgtgaggaattgttacaatacgcacgcatccgcacagataaatgccctttcatggcaacaaaaaccttttgcagcgcatgcaaagtgcattgctattcaaaggaaatgcagggaaggatcaaggaggttatgaggtatgccggtccaagaatgcttcttcatcacccctgtgcggcggtcagtcatatgtgtgttacgctgaaaggaaggttgaaaaagcaaagtgagaaataaaggaactacatacagaaaggggcggtttgatgtttcataaaaggctgctgtcagaatttaaagaaaacaaaagaagggttgtgggaatggtcttctcccaatgggtgatgctgcttgccaatattgtcctggtacgagtgacagcagagctggtctcagccctggctgggggcggaggggtaagcaggactgctctttggcttctggcagccggggcggcggcagttgtgatccgggcggggatgtcttattggaacagcagcctgtcctttgccgcttccagggaggtaaagagcaggctgcggaccatgatctatggaaaactgatgaaattgggaaataggtataaggaatattttcagacagcagagattgtgcagctcagtacagaaggtgtggaacagctggagatttattttggaaaatatgtaccccagtttttttacagtatgctggctccggttaccttgttttttctggtgggcaccatgaacctgaaggtggctgccgtgctgctggcctgtgttccgttgattcctgtgtccattgtggccgtacagaaatttgcgaaaaaaatgctggataagtactgggggacctatacggagatgggagattcctttctagaatgtctccagggactcaccactttgaagatttatcaggcagatggaaggtatggtaaaaagatggatgaagaggcggagaaattcagaaaggtgactatgcgggttctcattatgcagttaaattccatcagcatcatggatctggtggcttatgcaggggcggcagtgggaatcctgctgagcattttcgaatatcaaaggtctgccattgatctggcccagtgttttttcattatcatgatatccgcggagtttttcctgcctttgcgtctgttgggctccttctttcatattgcaatgaacggaaatgcggccgcagacaaaattttccggcttctggacgtggaggaggaagcagtgggtcaggctgttccggaggagctggagcaggaaccggatatttccttctgccaggtacatttttcctatgctgacaaggaggttctgactggaatagattttcagatgaagaagggactcactgcactggtgggggaatctggatgcggtaaaagcacggtggcagatttgatcatgggagagaggaaagccgacaggggagaaatccgtgtgggaggaaagcaccttaaggatatcccggccgaaacgcttagacgattcatcaccagaatccgccatgacagctacttattcgcagggacggtccgggagaatctgcttatgggaaacccagatgcagcagaggaagaactcttccaggtactggaacaggtaaatctgctggagtttgtaaagagcaagggaggcctggatttccggctccttgaaaaggcgtcaaatctatctggagggcagagacagagactagctcttgccagagctctgcttcatgacagcccggtatatatttttgacgaggcttcttccaatgtggatgcagaaagtgaggatgcgatcatctccgtggtaaagaagctggcagaaaacaagagcgttctgttaatctcccacagactggcaaatgtagtgggtgcagaccgcatctatgtgatgaaggatgggaaaatagcagaacagggcaaccatgagattctttccgaaagaacagggcattattttgcactttatgaaacccaaagggcatttgagcagtttggaaaggaggcagtgctctatggagaataagaaggagggggagagcaggaacggctttcaggtgatgatggggttgatcggcttggtgaagcctcttttggggcttatgtgtctggcggttcttatgggcagtgcaggaaacctgatggcatcctttatcacgattttaggaggtacggcactgggggtgctcctgggttattttccgggactttctcttaaggttctttttgcggtgcttataattttttctgtgctcagaggtgtgctccgctatggtgagcaggccagcaatcactatattgcctttaagcttcttgcccgcatccgtcatcaggtatttgaagccttgagaaaattagccccagctaagctggatggaaaggaaaagggaaatttaatctccgtgatcaccagcgatattgagctgttggaggtgttctatgcccataccatttcgccaatcgccatagctgtgcttaactctttgatcatgtgcctgtttttgggtagctttcacctttgtctgggaatcttggcaggaattttctatggattgatcgggtgtgtgatccctgtggtgaacagccgggccgggcagaactatggcagggaataccggtgtacctacggaaggctgaatacggttgttttggataacctctacggtctggaggagattctccaatatgaaaaacaggaagagcgcaagagaaaaatggaggatgatacctgtgagctggagcgggtgaaccataccctgaaaaagcaggaggcgattcagaaaatcaccacggatacagggattttggccggaggagtgctcatggctctttgcagtgcctggctgtgccagaagggactgcttcatccaggagaggccattgtatgcatcaccgccatgatgagttcctttggtcctgtggcggccctctcatctctgtcaaataacctgaatcagacactggccagcggaaaccgggtgttagaccttctggaggaaaaggccgttgtacaggatgtgcacagccaggtcccggttccccagggggatctctgcctgaaaaatgtgtcctttgcttatccggaagagaaaaagaaggggaaggcctgtgttgttaaggaaatgtttttaaacattgagagaaacacaattcatggtatcctggggaaaagtggatgtggaaagtctacgattctaaagctgtttatgcgcttttaccagacagacaagggcgctgtctgctacggtgaaaaaaatgtggatgccatagacacagagcttttgagaaaaaatatctcctatgtgacccaggatacatttttgtttcaggataccattgaaaacaatataaaggtggcaaaagaggaggccgccagagaggaagtcatagaggcggctaagaaggcctccatacatgaatttattatttctctcccccagggctatgatacaaagctcagtgagctgggagggtcagtctcagggggtgagcggcagcgtctgggcattgccagggcctttctccaccaggctgagattatttttctggacgaaccaaccagcaatatagacagccttaatgaggggatcatattaaaaagccttttgaaggagaaaaaggataagaccattgttcttgtatcccatagaaagtccaccatgtccattgcggaccgggtcacccagatgtaagggtctttattgagaaagcacggatgattcctaagagttagaaattatccgtgcttttttcatggaaaggtcaccaaacagcaccaattctccaatgtgcagctgtgtaatggcttttttatgtaaacaaaaaaagcaagctgcagtaacacagcttgcaaaaaggtcgcttatattcatctccgtttgttccaggaaagaattctacgtcactatagaattcttccctgaaacaaatatccccaaaaagaaatataaggtacacagagtctatatagcaataatacttttactactctttattgaccgtttcacaagtctgcgtatatgcgcatttcggttatgaagtaaccaacttataaaaactgagcttttaactcaatcaataaggcggcaaaccgccaatgggcagtggacccggctgtccgtatggcctcaactcccacaggagtggtccttcgtattcgctagaatagctctatgcggaaatatcgtctttcatattaataaatattggtggatttgtcaatgctttttctgaaaataaggtgtaaaattcggtatgacctgaatttagtatgggtattctgtacgtaatataagcagaagggaatataatagaagagaatttatatagaagaaaatttatatagaagaaaataggtggagtatgcaggatcagaaaatagaaaatcttttgaatttagcgctgtctgttcccgaggaggaccggcagagatccttgaatctgaatgtgggctttgaccaggaagaggaccgctgggatgtgatcgtgaaatatttaggagaggccgcagagcttgcagaagacggtatacagatacagccgctgctgggaaactatgcagtggtaagtctgcctcagagccggattccctcctttgcccaaaagccccagatcgcttttatagagaagcccaagcgtctttactttgcagtgagccaagggaaaaacgcctcctgcatcacatcggtggaaagacctccctacgggcttaccggaaggggcgtcctgattgggattgtggattcgggagtggactatagaaatggggattttcgcacagaaggaggaaacagccggattctccgtctgtgggatcagaccataaaaagcggaacacccccagaaggttatgcctggggaagtgaatacaccaaggagcagcttgacgaggccctggccctgtctcccgcccagggttataagctggtgccctccagggattttaccggacatggaacccaggtattaggcatagccgccgggaacggccaagggggaagcacggtaacccgggggattgcctatgaaagtgatcttgctgtggtaaagctgggcacacccagggaaaattcctttcccaggaccacagaattgatgctgggtgtggactatctggtacgcctggcaggggagctgggaatgcctctggctttaaatatcagctttggcaataattatggctctcatcagggagattctcttttggagacgtatctggacactgcggcagattttggccgcagcgtcatctgtgtgggaatgggaaacaatgcggctttgcctgttcatgattcaggtgtggtgagtactggtgaaaccaaagtcattcaattgggcgtgggagagtatgagccttccctgaatctgcaggtatggaagtcctatgcggaccagatggatatttatctggtccacccttccggcaggaccattggtcctctggatgaaaggctgggccctcaggaataccaggcgggaaatacccggcttcttgtgtattacggcgaaccggccccctttatggttacccaggagatttatgtggactttctgcctcatggaacctatgtggattctggggtgtggaagctccagcttcggggaagggatgtaaaaaatggaacttatgatctctggcttccaggaggaggcgtgctgaaccggtatacagggttttattcccccacgccccaggctacgcttaccattccttctactgcccaaaaggtgatttccgtgggggcctatgattccagaaatctggcctatgcagatttttccggaagaggctatggggataggggacaattaaagccggatctggcagccccgggtgtggatatcaccaccacaactgtggggggaggctataccaccgtatccggcacgtcctttgccacgccttttgtcacaggcagtgcggccctgcttatggagtgggggatcataagggggaatgatccgtttctttatggggagaaggtgaaggcgtatctgaggagaggggcaaggaaactgccgggctttgatgaatatcccaatccacaggtggggtggggagcattgtgtgtaaacgcaagcttgcctgataggtaggcttgcgctcacagtaagaagcgggtgaaaatagtgtttcgatttgcagatcagattgagaagttgacgaaggtattgaaacaggagattataccgtaataaaagctgacttgaaattttaagttccagtgcagagttaaattccacaggggattgaaaagtttacttccagtccgacagcagatttttgagatggttaaagcggatcagcttaggcgccagattgactttgtcaggggaaatcggcttaagctgtaatgcttttaacgtttcttctccaagtgtttgcaatgctacgctgtaaggtgttcttccaccaaggctttcgctaggggggaaattgatatgatttacaatcagattcacatcccattggatgagtggaatttaaaaatttattttaggaatctgattttaaaaaatgattaaactggacaaaatgtatgggttggtgtataattctgctcaagagaatatgaatagaaaaatagaaatctacaaatactatgtgatagaatacctaatataatggatggaggatatctgaatgaaagcgagaagaatagtgcgaattattcaaaacgaattgttcaattttaaaaatgtggaatacggacagatgaaatacaggaattacagtagcgtacaaaaagatgcatgtatttcagaaagcgatatagtaggaatttatggacaaaatggttctggaaaaactgccatggtagaagccttggatattgtaaaacatgcactgagcggaatggaaatcccttatgatacttatgagggcattttaagtaaagagaacaatacggttataaaaacagttttttttgtggagcaggaagaagaaaaatacagagtgcagtatgatctggcattttctgtagataaatcaaataaaaagattcatttgaaatcagaacgtcttgcgtatcagataaaaggacgtaactggaaaaatgaaaaaatgttggaatttcataatccatattacgacgaagatgcgattatcaacgacatagaaccgcagatggaatcaaaaagcattcatttcttcgaaaagacaggtatgctgaaaaaccttgctgtgtactgcgcacagaaaaacatttctattttctttaatgagcttatatcaaagagtattgcaaatagtgaaaaggaacaagacagtgagaaagaatttgtaagtatcgttcgtagtctgattcattttggctgtgcatgttttcaggtagtgaaagtgaatcagcttggggctatcaataacaacatcatcccattgaatgtgcatagagagaaagggaatatgattacccagggatgtctgcctcttgtcatgattggaagaggagaagtaccggaagaaatttatgaacagttaaagccagtgattgattctatcaatatagcaatcaaatctattattccgaagctttccatcgaattagttgtaaataatgaggaagtgaaaccggatggcaagaaatatatgcaggtagaagtatattctaatcgtgacggtaaaaggttccttacaaaatatgaatcagagggtattaagcgtattatttcgctgcttcaatatttgattgccctttataattcgcctgaaatatgtttggtagtggatgaacttgattctggaatatttgaatatctgttgggagaaatgcttggaatgatgatggacgaggcaaaaggtcaattgattttcacgtctcataaccttcgtgttttagaaaaactaccaaacaaaaacataatctgctctacaacaaatccaatgaaccgctatattcgattggttggtgtggaaaagaatcataacagaagagatttctatatcagaacaattacacttggaggacaaaaagaagaattgtatgatgaaacagaactgcaggctatgcgatatgcattccgtcgtgcaggacgtggagagtccaaggtcgaaattcaattgtcagatgctttccgacaaatactagaagacgatgtatagtaaaattggaaaggagaatgacttatgccacgaaagacggaaatgaaaaaagcagttgtgtttatcgttgaaggaaaatccgacaaagcagcattggaacatatttttaagatgatttacaaacataaaaatgtgacttttgagtttactcatggtgatttgaccagtgatgaagagttgacattggaagatatacagaagacaatctatgataaagtggaagcttatatgaaagagaataagctcaacaaaacccatatctggcagatagtacagatatttgatacagatggaacttatattccgaatagtgcaattgtaaaaggtgatacttcaaacttcttttattctacaactgagatcgcctgcaagaatacacagaaagtagttgacagaaataagtggaaaaaagaaatgatggatcagcttctagcactacaagatatcaatgggattccatacaaatgcttttttatgtcatcgaatctagatcatgccctatataatacacagaatctaacggatgaagagaaagaagaatattccaatagtttttatgaattatttgagggacgtgagaaacggtttattgacttcttgaataaggatgttgtaaatggctgccctaacagttttccggcatcctggagatacataaaagaggaattgcattcccttgaaagacatacaaatctccatatttattttttggagaacccatatctgtaaaaaagagttaagatggagaaaatatcttcttgtctccatccatcaaggatagatggaagaactggagcatcttctgtataattagtcattgtagcttcgttagttccagcaaagacatcaccgttgtagcaataatttaacaccaattttcactcaaaatggcaatagtttaacataaccctcacgaagttatgggaaaaacctcgattttgaccttaaaaaagttgaaattttttgtaacaataacttgacacaagcggggtatggggcgctgtgtgtgagggagagtctgccggagagtgaccggttagaatttaaagccacattaaaatgatgtatactgtttgcaacaggcaccctcttgtttgagtgagtattttgttggtggtacttcaattatacatcattctgcagagggtgtctttagtttgtgcaatattgaggatttactcatttataattgacaaaaagaaatttcgacataaaccattgcggtggctcatatcgagattactgttataataattattctgcctgatgattaatctgctgcaaatagaacattgctttttgcgcctcgatctctgcacgcagttcttcctccgtaggaagatatagtttgtacttagatgcaaaaagctgttcatttccgtggagtatagaatattttgagatatcttcgtccgtgtcagagcaaagaactattccaatcgtcggattatctccttcgctgcgttttaactcatcatacatacgaatatacatatccatctggcctacatcctgatgtgtgatcttttccgttttaagatcaatcagtacaaagcacttgagaatgtaattatagaacacaaggtcaatgaaataatcctgcttttctgtatggatatgctgttgtctggcaacaaatgcgtagcccttcccaagttccataagaaatttttgcaagttagacagaatgcttgtttcaagattactttctgtaaaatcactgctaggcgaaagtcctagaaactccgtaatcatcggattcttaatgaactccagcttgtcctgctgataattcgctgttatcttctgcatctcactctcaacaagttctttcttctgcgtctggagcattcggtagtaatattgtgatgaaatattacgctgtaaggtacgaacactccacgtctgttctgcaacttctttttcgtaccaatcacgggcatctttatcatttacctgcaaaagagtgcggtaatgtgtccacgaaagcagtggtgtagattttccacccactgagtggaaaatttccggaatcgagactaaaagaattttcttcttcattttccaaaaaagtcataaaaagctgatatatgatatcagtcgtaagcgcatagttttagggtgtatcccataaatgaaatctgacaccctgcgcgaggatgccagacatgcgagtattttactctattttatttacaagtttcctgagctagttcaccccatggggcaagccgttccaattcatcgtctgacatttcagcacctggacgatgctccagaagaaagtttagatacttatgcgggtcaagttcattggcttttgctgtttctatcatagaatagactttcatactggcatctgccccagccggggtgtcgctaaaaagccagtttttgcggcctacaaccagtggacggatgctgttctcactgagattgttgctcagactgcacgcaccatctttcaaatagttcatcatgaaagggcggcatccattagaatagttgattgctctgattattcggtctccggattctggatgcagttggtcaagccacgacaaaaaagcctctatgacgggtttttcatccttcagtcggcggttatagatttgtttgtgtgaaagtcctttctctcgataggaacgctcatactcaaacaatttattacagtataggacgccttggacagctggatgtgtataatccttttcatggcctttgggtatggcctgcagccaatagcgtcttatgtgtgtccaacagcagcaacgctgtgcatctggcactttgttgtaccccttgtagccatccaccataagatagtatccggattctgcaccagccaggaatgcagctgcattcctgccggccctagtcggagtgtagttataaaggataatggaatcccctccatcctcaccactgcgtatcagccagacataagatttactctggggtctccgtccttcttcctttaatacctggatcggagtctcatcagccatcaggtacctgcgcttcagtagtttcttgtgcaggtattcatacattggcagaaaataattctctgcacaatagatgatccaacttgccatggttgtacggctgatttttgcacccaaatgttcataatctttttcctgtcggtaaagcggcatagacataacatatttgtaatacatcacatgcgccgcaagaccagacgatacataactgcccgggattagtgcaggagccccttcgtccttaacgaactgaggatcttctgtttccttacatttggggcattcataggtggttgcataataatcaatgcgctccagttttggctccgtataacgaagctctgtccggatcagttcatgtccgataggaaccatcattgttccacagacaccgcacgttttctgttcttcggtaagagtatctacataaacattctctgtcggaagatcagaaaagatttcatcataagttgctttcggtttacgggccttcttgtgtgcctttacttcaatgtattctacttcaaggggcactggttccggttcgtcccctgcaggcagatgaaacaggtttaactgtccggggagctgatcatgacagttctcactggtagagccaaaaagtttggtcttcaaatagtccagctgtgcctgaagattagcgatcatcttgtctttttcgctatctctggcatcacgttcctgcagcattttctgcagggaacggataagctcgttctgagtgatgattgtattattcagttgtgaaatcgtatccttaagctctaagagctggatgtcttttattcctgaaggcattgtctttccgctccttttctatggttctattataccatgggacaagcgaaaagtcccgtaaaatcaagcacttccggcactttttattgcctttggctgctcgatttcaaggcctgacataagccagtcaaactgcctccatgtaatgggttttacttcattacggttgcgcggccaacggtattttcccacgttggcatcaaggcgcttatacaaaagtacgaatccttcacgttcatgaagaagcacttttatccggtcattacgtctgccacaaaagagataaatcgcattcggtctggaaggattcatgttcagctgatcctttatgacagcgcataatccatcgatggatttgcgcatatctgtataaccacagattacatagatctcgtctgcgacagtgatgtcccctagcatgtccctgccacagctttaagaatctgtgacaaaagtccaggggcaacatcatttgagatttttattgaaatagtccccaatatgatttcgatggccgggctggtttcttctgcaggaagtattgtgtctccggctgatggaatgcgtgatccttgatgatcaggtatcacctcaagctttacaacatcctgtttaagggctggcttataatcaccgcgtcctgtggcaggtggaatatcataacaggcttttttccttagccgttggacccagttgtaaaaggtgccaggattgatgtcatgctctgtacaccattggtaatcactaagaccgctgctgcggcattccatgataagttggtattgttcatctgctgtgcgtctttgcgtttttgttttcatacaggaaacctccataattatagtgaaacgctcgcatttcatagtatctagcgccgatactgtagtaaaatgctggcatctatcatctgtaattatgacaaatttttcagcggtgttaaatccaccctgaaactaggcgcttactatcagtctaatccagaccgtaatcctcactaatgtagctgcggatgattttcattactccgcagagatcgcaacgctccatataatccctccttcgcaatcttattctactgcttaattatcgaagtgttctgctcaaaattataccatcaactaaagtgtgggtaaagcacaccaatccaaactgaggaaaagccttggataatgtcaaactcccggagatcaaagatatgagcaaatcatttgaaaccaataaatcaaaaaagaagcggaagctacgattataaaacataaaaggaaaacctttgacaaagtttcacccagctattacaatagctcataaaagactgatggtatcaaacaaagatgagaggagtggttggagtgaggccatgggaacgaaatatccgcagagtagttccgtatactccgggtgagcagcctaaggatgcccggatgataaagttaaatacaaatgagaacccttatccccctgcaccgggagtaaaacgggttctggaggaattagagacaaagtctctgcgtctgtatccggaccctgcggcagcagagcttgtggaagcaatcgcacaggtctatggacttaaggaagaccaagttttcgtgggtgtgggatcggacgacgtgctggccatgtgcttccttactttttttaatggagacaagcctgttttatttccggatattacgtattctttttatgatgtgtgggcggagcttttccgcattccctatgcgtgcccgcctttaagggatgattttaccatagagaaagaggactattataaggaaaacggcggcgtgatctttcccaatcccaatgctcccacaggagcccagctgtcccttgaggaggtggaggagatcgtccgtcataaccaggatgtgatcgtgatcgtggacgaggcctatgtggatttcggcgcccggtccgccctgcccttgattgaaaaatatgacaatcttctggtggtccagactttttcaaaatcccggtccatggcagggatgcgcattggatatgccatgggaaattctgttcttattaaatatctcaacgacgtaaaatattcttttaattcctacaccatggacagaacagccattgccgctggtgtggaggcagtcagggacggagaatattttcaggaaaccgtgaataaaattgttcagaccagagaatgggcaaaggagaagctgaaggagctgggattttccttccaggattccaaagcgaactttatctttgccactcatgaaaaaatccctgccagagagctgtttgaggccctgcgggaggcccatatctatgtgcgctatttttccaagccaagaattgacaatcacctgcgcattaccatcgggaccagggaggaaatggaaatattcctggattttctgaaagaatatataagtaaaagaggataggagcttcctgtatactttaaagagtaaaggggttgaccaaagaaaatacctcaagtaaatttagattattactgaccagccagttggtaaaaatctaaacacacaagaggtatctaagatgaattctaaagcaagaaagacaaaaaagcaagcagccattgaaaatcaggcaataaatcttctgtcaaaagaggagatcaataagaaaatcgaacttatcgaaaaagatcttaaatcatcaacctggagagacttggaaaccagaggaaagtttgataaaaacgataaactctcttttatcacagatgacatgcttatagttggatgtgacataggaagtgaaactcattttataagagcgatcgatgtcagaggaagggaacttagcaaaggagcgttcgaattcagcaatactgcagaaggatttgtgagtgccaaggcatggatgatggatcttgcagcaaaaaatgataagaaacagatcgtgttaggccttgagccgacagggcactactggttcgcgcaggctgcatggatgatctcaaatgggatcagcgttgtacaggtgaatccatatgccgttaagcagagcaaagagatcgaagataacagccagcggaaggatgacagaaaggatccgaaactgatcgccaatcttgtgaaagatggtaattatggaatgccatatctccctgaaaagatttatgcagatctgagaagactgtccatgttcaggggtcagctcacagaagaccggatcagaaacatcaaccgcctccaccgggaattgaagatctattttccagagtatatggacgcattcgggaaaatagaaggagcgtttgccttagaagtgctgaagacaacaccagttccggcagagatcgtaaaacttggagaagaaggcttaaggaacatctggcgtgaagcgaaactgagaggacgcggttacagcagagccagtgctatcataagttatgcggaaacaagtgtaggattgacggacggaacggatgccggcaggggagccgtgagatggtttgcagagcagatcataaaattagatgaacagcttgcagaggtcgggaatgcactgaataagaaatgcatggagataccatatgcagaaaatatcctgtggatcaatggagttggtgagaacattctggcagggatccttgcagaaatgggggatatcagcaggtttgatgatgtaaaagaaatacagaagttaagtgggatgggtctggttgcctgcagttcgggcaagcataaaggacagacaaagatcagtcacaggggacgcaaacgactgagatactggctgttccaggctgcaaggtcagcggtttcccatgctgatgaatttaaacagctgcatgagtattacacaacgcgggccaataacccgctgaaaaagaagcagtcgctgattgtaatagcgtgcaaaatactaagggtgatatatacgatcttaaagacagggacaacctatgatccggaaaaactgttaaaggatatcaaacgcccggtgaaagcatcagcacaagcagcagcataaaaaaacagaaacaaagcggtccaggactctgccgtgcctctgtcagcaagtgagggtggcagggcagggttctggataagaaacccgtaaacgatggagtcagaaacggacaacatcagcacaagaccaactggagactatggtggcatagcatccactgatgagaacagtaccattgtagaatgaaggcgggtcagtaacaatcaaacaaaaaacaagagctgtagccggcatcgttttattccgtggggcatgaccccgtttaggagcttggctggcactcagtgtatggtagatgggacgaaggaagttgggacacgatccccttagacacggaaggttcatcatcatagttgatcagagggaaaatagcctttataaagcaaacaaagaggatgcttttaaagttgtaccccaaaatcagctattcggtacaagataccacgatatccatcactatcggctctgttttagaggtaaataaaatcgtcaaagccctgaaaaaatgtacatttagggcttgacagaataggaaggaattatggaatcactggtacaatggtttacagcgaatttgtcggaatatatttcggcggaggctgtcatttttcttatttcaatggtgcccattctggaattgaggggagggcttttagctgccacccttttgaaaattgaggcggcaaaggccattcccatctgtattattgggaatattatccccatcccgtttattctgctgtttatcaggcagatatttaagcttatgaagaagaccaaggttttccggggattgatcgaaaagctggagagccgggccatgggaaaaagtgataagatcaagcggtatgaattctggggcctgctgctttttgtgggaattcccctgcctggaacaggagcctggacaggtgctctgatcgcatcccttctggaaattgatataaaaaaatcagccctggcaattctgtgtggattagtgatggctacggtcattatgtatttcttgtcatatgttttggtgggaaatgtggtaagttaagcgaaggaaaaactcctcttagttcacaaaaagtaagtctgaacagaggagttttcttatgtaataaaaaccctccgggggatgcacacaatgtgccaagaaaagcggcttcagctcttcccagaatattgaccgaaatttggtttttccagatggacgttaaagcgactacaagactctggggattttcggggaaaaattttgtgaattctagtgaatgtaaaagtaaaatttatatttgcaaaataggaatttgcagtataatgaaagaaaaagtgtaaaggtgtcgacaagtaatgattgcatgaaccagtaaacattcgttataatgaagataccaaaaccagaaagcagctgatctgtgctgccggatgcgcagtggatagtgacggccagaaggccggcagctggggtatggaaaaatcttgcaagaaaaaagagaatatgatacactagaggcaatattaaaatattttctaaatgcatcaagtcacttcagactgaaattccgataagttacaatgaaatacggacattagaaaacatagaaaccacagatgcggcagcggctgctcagaaggttaaagtcttgcagaccagactttttatatggcctcaaagaaaaatgttgcgaggaggcaacaaagcggatgaagagaatccgttttaactaacaagacaagaatgtatcagcaggaagaggtaaatgatttatgagagaaaagtacgaatccttatcgttggcagtattgaaggagctggcgaaggccagaggactaagagggatatccacattgcgcaagactgagctgatcgagcgcatggtacaggaagacgagaatggaaagaaaacatcccagtccgcccaggaagaatcaagccgtgaaaaagaagcttcacccgcccagacaaactcacagcatagcagtccggttaacacagagccagccgtcttatcaccacctcaggcacgtcagccgagaattcagacaaacagtcatcagggagtccagacgaacggatatcagggagcacagtccagcatccgtcagggagctcagtcaaatggggtgtcagagaaccagacaaacgggtctcagaccgcccagtcaaatggccattcagctccttcgtcaaacagccagcagagcagtcaggcaggaaacgcgtcccatgggcagggacaggcgaatgtgcagcaggcaggcgctcagggctggcagcaggacaatagcagggaagaacgcagagagagtggggacaggccggccatggacactgcccagttggacagcggggagcgggcaaacggaattttggaggttatgcaggatggttttggttttatccgctgtgcgaattatcttccgggagacaatgatgtgtatgtgtcaccttcccagatccgccgttttggcctgaagaccggagatattcttcagggaaatatccgtattaaaacccagggggagaaattcagcgctcttctctatgtaagtgccataaacggtatgccgccctccgtggcatctcgtcggagtaattttgaggacatgacccctatttttcccaatgaacggatttatttggagcgtccgggaggcagcatggccatgcgtattgtggatctcatcagtcccattggaaaagggcagcgtggaatgatcgtgtcccctcccaaggctggtaagactaccttattaaaggatgcagcaaagtcgattttacataacaacccggaaatgcatctgatcatccttctgattgatgaacgtcctgaggaggttacagacatcaaggaggccatccagggaaaaaatgtggaggtgatctactccaccttcgatgagctgcctgagcggcacaagagagtttccgagatggtcattgagcgggcaaagcgtcttgtagagcacaaaagggacgtgaccattcttctggactctgtcacccgtctggccagagcctacaacttgatcatccctcccagcggcagaaccctgtccggcggtcttgatccggctgccctccatatgcccaagcgcttctttggagccgcccggaatatgagagaaggaggaagcctgaccatactggccacggcccttgtggatacaggcagtaagatggatgatgtggtctatgaggagtttaagggaaccggcaacatggagctggttctggacagaagactccaggaaaaacgggtatttccggccattgatatccagaagtcaggcaccagaagagaggatctgttgttcacaaaggatgagcaggaagcggtctttattatgcgtaaggccctcaatgggatgaagacagaggatgcggtagaacagatcctgaatatgtttgcccgcaccaggaataatgaggaatttatccatacggtaaaaaaacagaaatttttataaattccttgcattcatgaaggggatatgctataatcaaaaagctgtttagaaaaatgaaatcggcaataaaaacgtataaagagataaaatgatcatagagaggtgaaaatcatgagagaaggaatccatccaaactaccatcaggcaactgtgacctgcaactgtggaaacacttttgtaaccggttctacgaagaaggatattcacgtggaaatctgttccaaatgccatccgttctataccggccagcagaaggctgcacaggctcgtggacgtattgataagttcaataagaaatacggcctgaacaaataatacaacatatagggtaagagacaggttgaggttaaagtacataatctcaacctttctttaaatttataggagaataaaatgggatcatccaacattggcggccaggcggtcatggaaggcattatgatgcgccacaaggataaatatgccattggcgtgcgccggccggataaagaaattgaagtaaaagtagaggattacaaaagtgtctttggcaagctgaagatcatgagaaaacccatattaagaggaatggccagttttgtggactctcttgtggtgggcaccaagtgcctcatgtattctgcggagatcgcgggagatgaggatgacgaggaagagctgaagaagcgtgagcaaatgtcccaggaagagagggagaagctggaggccaaggaatccaagcagatgaagatcctgctcaatgtgacggtaactgtatccatcgtgctgtcggtggctatctttatgatgctgccgtacctgctggccagcggtctgaagaaggtgggggcttccgaggtggtgatcacggttgcggaatcctttgtgaagattgccctgtttatgggttacatgctgctgatctccagaatgaaggatatccagagaacctttatgtaccatggggcagagcacaagtgtatcaattgtgtggagcacgggatgcccctcacagtggagaatgtaatgaaaagctcccgccagcacaaacgctgtggaaccagtttccttctcctggttatggtcgtgagtatttttatgcactttatttttgtgctggttcctgttttttgggtgcgtcttgtgggaagacttttaatggtgccccttgtggcaggtgtttcctttgagctgatccagtgggcaggaagaagcgagagtaaggctgcttctattttaagcaagcctggaatggcccttcagaagctgagcaccaaagaacccactgcggatatggcagaggtagccattgctgccgtggaggcagtgtttgactggagagcttatctgaaagaggaattcggtgtggattcagaggaaaagagcgcatgagcagcttcgaggaggtgctcagggccggaacggcccttttgaagccggagcagcttatggatgcatccgtggatgcctggctgcttatggaatatgtttttcagatcaccagaacctggtattttgcccactctaaagaagaggcggatggggaaaagacccaggtttacatggaactgatacagagacgaagaagacggatccctcttcagcatataacacaccaggcctttttcatgggaagggaattttacgtggatgaaagagttctggtgccccgtcaggatacagagatcctggtggaggaggcaaagagggtattaaggccgggtgaccaggtgctggatatgtgtaccggctccggctgtattcttttaagcctgcttttggaggtccccggcagtaccggggtgggaagtgacctttctgcaaaagccctggaggttgccaggatgaaccgggagaaattaaaactttcccaggaaaccgcctgttttcgggaaggcgatctttttgaagggataggcagagaggaacgctttgacctgatcgtttcgaatcccccttatattcccacagaagagatccgtgttctggagcctgaggtgaaggattttgacccgatggccgctttggacggcggaaaagacgggttgtggttttacagggagatcacccggcaggcgggggatcatttaaagccggaaggctggctattttatgagatcggctggaatcaggcgaaggacgtgtgcagctttctagagaaagccggatatgaagagatccgtgtgatccaggatctgtccggactggaccgggcagtgtgcggccgattggaaaaacaacaggaggaataccatgtttgacagattagaggatttgctcattcgatttgaagaggtgctcagtgagctgggagagccaggggtcacagacaaccaggccaggttccagaaactgatgaaggagcagagcgatttacagccaattgtggagacctataaggaatataaaaactgtaaacagacagtggaggacagtgtgtccatgctggaggaggagaaggatgaggagatgcgggacatgctcaaagaagagctctctgacgccaagaagcgtattgaggagctggagcatgatctgaagattcttcttctgccaaaggaccccaatgatgagaaaaatatcattgtggagatccgtgcaggtgcaggcggtgatgaggccgccctgtttgccgcagagctgtacagaatgtatgtaaattacgccgagagcaagcggtggcggacagagctggtgagcgtcaatgaaaatgggatcggcggctttaaggaatgtgtattcatggtcaccggccagggagcctattccaggttcaaatatgaatccggggtacaccgggtgcagagagttccggccacagaatccggcggaaggatccacacctccacagcaaccgtggcggttatgcccgaggcccaggaagtggatgtgcagatcgacatgaatgactgcaggattgatgtgatgcgtgcctccggaaacggcggccagtgtgtcaataccacggactctgcagtgcgtctgactcatatgcccactgggatcgtcatctacagccagacggagaaatcacagcttcaaaataaagagaaggccttccggctgctgcgctccaagctctatgacctggagatggccaagcagcacgacgcagaggcagaggccagaagaagccagatcggaacaggagaccgttctgagaagatccggacctataatttccctcagggccgggtgacagaccacaggatcaagttaacccttcaccgcctggacggcattttaaacggagatctggatgagatcattgacagtctgatcgccgcagaccaggcggcgaagctgagcaaattacaagaacagtaataggatacgaggaagcagaatatgaagaaaacagcattagtcattatggcagccggagttggaagccggtatgggaatgggatcaaacagcttgcacaggtaggacccgcaggagagattattatggattactccattcatgacgccctggaagcagggtttaataaggtagtctttattatccgcagggatttggaagaggaattccgcagggtgatcggagaccgtattgaaaaaatcacagaggtggcctacgcttttcaagagctggatgatctgcccgaaggctttttaaggccagcggacaggacgaaaccctggggaaccggacaggcagtcctggcggctaaggagtttctcacagagccctttattgtgattaatgcagatgattattatggaaaacaggcctttatccgtgtgcacgactatctgatccaggagcagccccttcaggaaccccttcagatctgcatggccggctttttgctgggcaacaccttaagcgataatggttctgtcaccaggggtgtctgccatatgaatgaagagggatatctggagagtgtaaaagagacccataacattataaagacccctgagggagccgcggtacagatggaggatgacaccttggtgccagtggatgccaagagtctggtgtctatgaacatgtggggactgacccccgcctttttggcagagctggagaaaggatttgtggagttccttcaggacctggatccacaggaccttaagaaggagtacctccttccagaggtcattgacaagatgatccacagaggccttgcccaggtaaaagtccttaagaccaaggatacttggttcggggttacctatcaggaggataagcctgtggtacaggccgccttccgggatttacaggaaaaaggagtctacggggaaaatttatttgcataaaatgtgacaaataaaggaaaatgtgctactatgctaaagtattaatcaatcaacttggtgcattgcgcggttttcctgaggggattccgggcgaggccaggaggaccagtcataaggagataatattatgggaaaatattttggaacagacggcttccggggagaagccaacgtagatttaactgtagaccacgcgtttaaggttggacgttatctgggatggtattacggacagaaccacaaggcaaagatcgtcatcggcaaagatacgagacggagcagctatatgtttgaatatgccttggttgcaggacttaccgcgtcaggagcggatgcatacctgctgcatgtgaccaccacccccagcgtttcctatgccgtgcgcacagaagattttgactgcggtattatgatctctgccagccacaatcctttttatgataacgggatcaagatccttaacggaaacggtcagaagatcgaggctgagattgaagacaagattgaagaatatattgacggaaaagtgggagagcttcctctggcggcaagggaaaatgtgggacgtaccattgactttgcatccggaagaaaccgctatatcggatatctgatctccattccctccagagattttaaaaatatcaaggtgggtctggactgctccaacggaagcagctcagccatcgccaaaagtgttttcgatgccctgcgggcaaagacctatgtgatcaacaatgatccggacgggaccaacatcaataaaaactgcggttccacccatattgatgtgctgcgcagctttgtgatagacaacggactggacgtgggatttgcttatgacggagatgcagaccgatgtattgctgttgaccataaggggaatattatagacggcgacaagatcatgtatgtgtgcggcaagtatttgatggaacaaggcaaattaaacgggaacgccgtagtcaccacagtgatgtccaacatggggctttataaggctctggagagggagggcatgcgctatgagcagacggctgtgggagataaatatgttgccgagaacatgctggcaaatggctacagcattggcggcgagcagtccggacacattattttcagcagatatgccgcaactggggatggtcttttaacttccctgatgctcatggaaacctgcgtggagaagaagagcaccctttatgacctggctaaggaaatgaaggtctatccccagcttttgaaaaacgttcgtgtagcagacaagaaaactgccagggagaaccccaaggtggccgctgcagtggagcaggcggctttggagctgggagaggatggcaggattctggtccgggagagcggaactgagccggtgatccgtgtaatggtggaggcatcaacagatgatgtgtgtaaaaaatatgtagatcttgtaatcgctgccatggaggaagaaaacctgatcgtagagtaggataaaacatgagaagatacagacagatcgttttgggatgtatggctgccctgcttttggcgggctgcggcggaagtaaagaagaaatttatcagcaggcaggcaaggatctggagcaggccaattatgaatatgcccttcagggctaccaggattccatcaccaatgatgtgcatcttggccagtcctacagaggagcgggcattgccaatctggagctgggtaattatgcagaggccattaccttttttgagaaggccctgggagaagagaagctgtctgactccacaagaaaagacattctccagtaccggataactgcctattataaagcaggacagtatgaaaacgcaatggctgactgccagaccctggccgagttcggcttagatgagcagggatatctgctcacgggaaaagtggctctggccatggacgtatacgatgaggcagcctccaatttcaacaatgcctacaatgaagaatccacctatgatatggccatacagatctatcaggcttatctggagaaggggatggaggcggacggaacccagtttctggaacgggctctggaaaactctccctctagcgcccaggattactgtgacagaggcaggatttatttttacatggaggactatgggaatgcccagaaggagcttatggaggctgtgaataaagagaacagccaggcagtgctgcttctggggaaaacctatctggctcaagaggatgtttccaatgccagggccatgtaccagcagtaccttgagctggaagaaaatacagccaagggatataacggcctggctctatgcgatatggcagaaggaaaatacgacgatgccctggttcatattgagaaggggcttgagaatgcacagacagaggatatgcagaatcttttgttcaatcaggtagcagcctacgagaaaaagctggattttgccgcagcctatgacaaggtacaggaatatctccagatgtttccaggggaccaggaggccgagaaagagcggattttcctggcgggacgcattcagagtgcacagggagctggggcagcccagacccaggagggtgcgcaggcacctggagaggctgtgaatccggaacagactggactggaggacgaaagcggacaggaaaccggcggtttccaggatggaagtgtgccggaagaggaagttgtatattaacacagacagcattggaaacaggagattttcatgcaattatatgatttgaaggaacagcaggaatatgtgattttaatcggcgttcagacccaggaggaccaggatacctgggaatccttgctggagctggaggagctggccaagaccgctggcgcccagaccgccgccaaggtggtccaaagcagagaggcggttcatccgggaacctatatcggaaccggtaagatcgaggaggtccgccagatgatacaggcctttgaggccacaggcgtcatctgtgacgatgagctgtcccctgcccagatgaacaatcttcagagagagctggactgtaaggttatggaccggacccttctcattctggatatttttgccagacatgccaccaccagcgaagggaagatccaggtggagctggcacagctgaaataccgggcagcccggcttacggggcttggaaattctctgtcccgtctgggcggagggattggcaccagaggaccgggagagaagaagctggagatggacaggcgtctgatccgcaccaggatctcccagctgaaacaggagctggcccaggtgcagaggcacagggaccttctgcggttcagaagaaagcagggcaatgtgaaggtgggggccattgtgggctataccaatgcaggaaagtccacgttattaaacaccctcacccatgcaggggttttgtcggaggacaagctgttcgctaccctggaccctaccacccgtgcgctggtcctggaggatggacagcaggtgcttctcaccgatacggtgggttttatccgaaagcttccccatcatttggtggaggcctttaaaagcaccttggaggaagccaagttcgcagattttattattcacgtggtggatgcctccaacccggccatggaggcacagatgcatgtggtttatgacattctcagggagctgggggctggcggaaagactgtgatcacggtgttcaataagcaggaccagatccaggggagagatcatgtaagggaccttcgggctgactataccctggggatttctgctaaatatgggacagggctggaagagtttaagaagattttggagaaagtcctggcagagggacagatttatgtggaacgtgtgttcccttaccaggaggcaggaaaaattcaattgatcagaaattttggccagcttttggaagaggaataccagtctgagggaattgccgtgaaagccagggtgcccatggaaatttatgaaaaagtcaccggcagcctatgatcagagagtatacacaagccaggaaatctcgtgattttcagaaaatagatgataactgtataatataaaaacaatgggaatgcaccatataatgttgcttacgtaaaaagaggcacaatatatggtgctttctattgactcatctgggacactctgctacaataggaatacaccgttatgaggaagcagcaggcaggggaggacaaaaaggattcccctgcatttacatcccatggagggaaaaggtcctgtatatccggtgaaaaggagcacaggaacctgtacagaagagaaaatccagatgtacggcgagaatcataattacacggaacggccgtctgtgaaggatccatacagccggctggaccagatgaaaaatacaaaacagaaggttagggttaaagggaggcagcaccatgtttcaggtagtgaaaagagacggcgaaatcgcagatttcgagttaagcaagattaactccgccataaaaaaagcgtttgacgcaaaagaaaaatattatagtgaggatatgctcagtcttctggcgcttcgggttacgtcagattttcaggataagatcaataataacaccatcacggtggaggatatccaggacagtgtggaaaatgtgctcatccagtccggttatgcagatgtggcgaaagcttatattctgtaccgcaagcagagagaaaaagtccgcaatatgaagtctaccattttggattacaaggaaattgtgaacagctatgtgaaggtggaggactggcgtgtaaaggagaattccacggtgacctattccgtaggaggccttattttaagcaactccggagctgtgacagccaattactggctgtctgagatctacgatacagagatcgcggatgcacacagagatgcagacattcatcttcatgacctgtccatgctcaccgggtactgtgcaggctggtcactgaagcagcttattaaagaggggctgggaggaattgaaggcaagatcacctcctctcccgccaagcatctgagcgttctgtgcaaccagatggtgaacttcctgggaatcatgcagaatgagtgggcaggtgcccaggcattttcctcctttgacacgtatctggcgccttttgttaaggcagaccacttaggctacagagaagtgaagaagtgtatagaatcctttatttacggggtaaatacccctagccgatggggtacccaggcacccttttctaacattacactggactggacagttcccaacgatctggcagagctgccggccattgtaggcggtaaggagatggacttcaaatacaaggactgcaagaaggaaatggatatgatcaacaaggccttcattgagaccatgattgagggggatgccaacggccgcggcttccagtatcccatccccacctattccatcacaaaagacttcgactggtctgatacagaaaataaccgcttgttgtttgagatgacagccaaatatggaacgccctacttctccaactatatcaacagcgacatggagcccagcgatatccgcagcatgtgctgccgtctccgtctggacctgcgggagctgagaaagaaatccggcggtttcttcggttctggtgaaagtacaggctccatcggcgtggttaccatcaatatgcccagaattgcctatctgtccaagacaaaggaagaattctaccatagactgaatcatatgatggatctttctgccagatctcttcacattaagagagaggtgatcacaaagcttctcaacgagggcctgtatccttataccaaacggtatctgggatcctttgacaatcatttctccaccatcggccttattggtatgaacgaggtgggcttaaacgcaaaatggctgggtaaagatatgtcagaccccaaaacacaggaatttacaaaagaggtcctgaatcatatgcgggagcgcctggccgattaccaggtggaatatgaaggtgagctgtttaacctggaggcaactccggcagagtccacgacctaccgttttgccaagcacgacaaggagaaatggcccagcattatcactgcaggccatgagggagatactccttattacaccaacagctcccatcttcctgttgactatacggaggatattttcgatgccctggatatccaggatgagcttcagaccttatatacctccggcacagtattccacggattcctgggagaaaagcttccggactggaagtctgcggctgctctggtgcgcaagatcgcggagaactaccgcctgccctattataccatctctcccacttattccgtgtgcagagaccatggatacatcagcggcgagcactttacctgccccaaatgtggcaaggaagcagaggtgtacagccgtattacaggctactaccgtccggtgaagaactggaatgacggaaaagcccaggaatataagaacaggactctttacgacatgcttcattcacagataaagaccgtgcataccagcattgtcaccatgaatgaggaggatgtccaggtacaggaggtaaaaacccagaagtacctctttaccaccagtacctgtccaaactgtaaaatggccaggaagatgctggaaggagagcagttccaggtgatcgatgcagaccagaacccggagctggtgaaaaagttcgggatcagacaggcacccaccttggttatcactgatggtgaggactgcctgaagaaatatgtgaatgcctccaatatccagaagtatgtggagagcacacaggaaatcgttcattaataaaaattccatagagattgaccaaaagcccttttttcctgaaatggagacaagggctttttttgttgcgcagaaaagttcggagaactttcctgtgtaacaaaaatcccctcattaccctgcctgaaaaagtgcccgaaatagatagggtaaaattgtgaaatataacgaaactgtaaaattgtgttgacaaaaaactgagccgcatgtaaaatctaatcatagagtacacgggtacgcaaagtaaattttcacataattcagaaagcgtgtactgaggaatgtatgtaactttgtgataataaaacagaaaaaaataccccatataattcttctctgcgaccaacaaaggaatcattacacaggatatttttctgccatattataacccaaaacagaatgtttgtaaacacttttacagggccgcaaaattacatctttccggaaaccttaatattataacattcaggaggtaggaaaaatgaagaaaaagttactcagcggtttactctgcacagcaatggcagcctctatgctcaccggactttccgtggaggcaatggcggacgacagccagacgatcaccatgtggaccgtatttaccggctctgacggtgacattttaagagagatcatcaaggactacaatgacacaaatgaggacggtgtgaccgttgaggttgatatcatggacaacaatacccttcaggccaagcttcccacagccgtttccaccggaaccggaccggattttgttttaatgggaattgaatttgtccaccagtatgctaacaatgacatgcttatgcctattgatgatttctgggaggttaccggactggacgaaggcaactatctggaaaacatcgtaaacaaatccgtggtgaacggtactctctatggcgttcccatgcagtataatcttcagtatctgtattacaacaaggatatgttccaggaggccggtctggatccagagcagccccccacaacctttgaggaactggctgaatatgccgagaagcttaccgatccttccaaaaaccaatatggaatcggacttcccattgactataccgcttattgtgagtacctatggggcaacggcggggacattatcagtgaagatggcacggagaaccgtctgaattctgaagagaacattcagaccttggaatggcttcaggacctgctcctcaacaaacaggtttctccccagggcctgcgggccgccgatgcggataccatgttccaatccggccagctggcaatgtacaccagcggtccctggaatatcaacggtctgaagcaattgggcgtgaacttcggcatcacagccattcctgcaggaacggccggcgctttctctcctgagggtggatgtgcctacatgattccaaaagggacagacgagggtaagaaagaggccatttacaaatggatggcccactggctttccgatgatgtattaaaagagtggtcaaccagaaatggttttcccgtttggtccaactccctgttggaggatgaggaagtgaagagtgatgagatcctcgctgcagtgtctgaagcatccaccatcggccgggactggcatctttccttagagagtggaagccagatcgatcaggatgtgatgcttcctatgatggaacaggtattgtcaggagcagatgtcacagaagcagttacagcagcatctgctgtattggacggtattattgcaggtaagtagaggaatgggctgttgcagtaatgcaatagccctttttatacaagagaatttcttatataagaggaaacctgccaaatttcctctgtataaaaactataaaaatccgagaggaggagagaagaagtgaatcagaaaaagaagggcagccagccccagaatcagaagcaagcctatttgtttattgctccttctttgcttatattaaccatctttgtgtttattcccttgatcggggctctggccatcagcctgatgaacattgatatttacatgaatgatatttcctttgcaggtctggctaactatctgaaaattttcagtgacagcagagtgggaaacgccaccttgaattccttttattttgccattctggaggtgcccctgcagattttagctgccctgctcatgcttatgcttatgatcaagaacaatcgttttcataaatttttgagaactgtgttctatctgccttatgtgtgctccatgacggccatcagtattatgtggtccatgctcttgaacaccaactatggaatgcttccctatttgttccgtctcattgggatcaaccttcccaatgtgctcaccagtaccacctgggctatgcccacagttatcgctgttacagtgtggaagaactttggctataccctcaccctgctgtcagcagcagctctgggtgtgtccagctccctttacgaggccgcggacattgacggcgccacgggctttcagaagtttctccatgtgacacttccaggaatccggggaaccatcaacttctgtattgtaaccacgctgatcacagcccttcaggtgttcgaccaggtgtatgtaatgacaaaggggggcccgctccacaagacagagaccctggtaagctatatttacaatcaaggcttccaggtggcaccctatgatctggggtatgcctcctctgtggcagtatatctcttcctgatgatcgccatcattacctttgtattgagaaaatttatattgaacagggggcttgacgaatgaaaaagagaaaaatccatgcttcatcggcggtgggggttgtggtcactgtgcttattgcagtcttggtcctttttccgcttatctggctgctggtgtcctcttttaagtctgatgcagatgtgatcaagtggccgcccttgttttttccaacccagtggctcaccacccagtaccaatatgtggtggatgccatccccattttatccatgctcaagaacaccattgtgtttgccctgggtgtcacggtgatcagcctgttctttgattccatggcagcttatgcattttccagaatgcagtttagggggaaaaatgtattgttcggcattatcctgctgaccatgatgatccccttccagatcattatgatccctctgtacattgaagagtttaagattggaatcctggatacctatgcaggcctgatcctgccaagggcagccagcgcctacggaatcttcatgctcacctccttctttggaaatattcccaaatccctggatgaggcagccaggatcgacggcatgaaggagcggcagatttacagcaggatcatccttcccctggccaagccggcctttgtgactttggggatttaccattttatgaataactggaatgacttgatctatcccatgatgctcacaagttctgtgaacaaacgaaccctctctgccgggctggccattttggtgggcagcaattccattaagtacgggcccacactggcggccacggtgatctccattgcaccgctgatggttctgttcctgttctgccagaggttctttatggaaggaatctccacatccggtatgaaagaatagatcggtgagcacataaactgccatatttgtccctaaacatggtagaataaagaaaagcacagctatcctttggatgcagcaggtgtctgaccagaagagaacacttgtaaagagggatgaaaggtacagcaaagaatctagaaatttttagggaggatactatgggaattacaacaaaagatattgcaagaatctgcggggtatcccgtactacggtccacagggcgttaaacaatacgggaaggatcagcgaggagaccaagaagctgatcctggatacagccagggagcatggctaccgcccggaccttctggccaccgggctggccaagggcaagacctattatatcggcgttgtgatcatggatgtaaacaaccgatatttctcccagatgctcagtgctctggaaattgaagcccgggcaaacggatattttgtaaacatcacccttcatcaaaacaacaaagagattgaacgggaacagttatgtaaactggcagattaccatgtggacgggattattttgtcctctgtaaataaaggcagggactataaaaaatttattgacagcttaaaaatacccgttgtcaccattgacaataaaattgcaccgggcatccccttcgtgggcgttgacggcagaactgcagtatcccatgctgtggaggagattgccggagcaggttatgagaagatcgtttttgtctgccctccactggctgacaaagatgcagaaaatgtatatgttcatgaggagcggaccgctggctttcaagaggcaggcaatagccttccccacatggaaaaggtgcttttgggagactgggagtacctggagaaggcatgtgagattctggaacacagtactaagaaaacagcgtttctgtgcacaggggatatgtttgccctggagctgatgcagaccttcaagaagatggggaagcgggccggagcagactatgggcttatggggtacgataacattgaccttctggaatatgtgtctccccgcctgagcaccatagacaaccatgtggagatggtagcccagaatgctctggaagtgttgctggagctcatggacaaaaaagaggacggcatccaggaaagaatactggagactgagacaataaaaggcgagaccatatagctgaggtgaaaattttatgcagaaaacagtgattactgtaaatagaaagtttcaaaaaagtcctattgacagcaggatctacagctcctttgtggagcacatgggaagggtggtgtatacagggatctatgagccgggccatcccacagcagatgaggacggattccgtcaggatgtgctggagaaggtaagagaaatgggtgtgacgctggtgcgctatccgggaggcaattttgtatccaactatgactggcaggacggcgtgggacccagagagcaaaggcccaagagactggagctggcctggcgggccgtggagaccaatgaggtgggcatcaatgaattcatgaaatgggcgaaaaaggctcaagtgaagcccatctgtgccgtgaatctgggaactaagggaattgaaaatgccgtgtcctttttggaatactgcaatatgccaaagggaaccatgtacagcgatctgcgggcatcccatggagtggaggacccctacaagatctcaatgtggtgtctgggtaatgagatggacggagactggcagattggtcacaaaactgcccaggaatacggccgtctggcccaggaaacagcaaaggcgatgaagctggtggatgaaaatatagagctggtggtgtgcggaagcgcaaaatccgatatgcccacctacccggagtgggaggccacggttttggaatatgcctacaacaatgtggactatcttgcccttcaccagtattatggtggacaggatatgggaacccctgcttttctggcacagtcagtggatctggatcagtacattgacaccgtaagcggtgtgtgtgattacataaaggccaaaaaacgttcccagaagacggtgtatatcagcgtggatgaatggggcgtgtgggctccggaggggaaggtggcccacccggaggcaagccaggcgccctggcaggtggctcctcacttgagtgagcaggtgtacaccatggaggatgcactgctctttgccagtatgcttatgagttttgtgcgtcacagtgaccgggtgaaggtggcctgccagtccctgctcaccaatatcagcgcggcaatcatgacagaggaaggcggggaagtgtgggtgcagcccatctattaccctttctcctatatgtcaaagtatgcaagggggattgtcctggaagaggctgtccaaggaccttcctatgactgttccctggcaaagggcgttccctttgtggatacggtatcggtttataacaaggaccagggtgaggtggttatctttgcggtgaaccgctcggagacagaagaggccttggtggaatgggaactgcagggttttactcctatggaggttatggagcagacggttatggatgctcaggataagaaagataccaacctggaggatcatgacaaggtaatgcctcattcagaaaataatgcagttttggaccaggaaagagtaagcttccaggccaaacccctgtcctggaatatggtacgggtaaaaatcaaagaatgatgcccggaacagcactggcggccctaaaaagggccgccagtattcgtatcaggacatattttgtgtttctaccagatgagtggctccgtacatttcccggagcttgggtttttcaatcttgccggtgggatttctgggaacatcggcaaagaagatttttctgggacgtttatatctgggaagctgtttgcagaaggtatcgatctcctcctctgtgaccgtttcccctggttttagggaaatgatggcggcggaaatctctcccagacgtttgtcaggaagaccgatgacagccacatcgtgaatggccgggttggtgcgcaggaaatcttcaatctgtacagggtaaatattttccccgccgctgatgatcacgtccttttttctgtcaaccaagaagataaaaccgtcctcgtcttcccgggccatgtctccagtaaacagccagccgtcatggagaacctcctgggtggctttgggatctttataataacacaccatgacgccgggacctttcacagccagctctccggtctctccaggttttaccgggctgccctggtcatctacgatcttcgccttccagccatagccggcttttccaatggcgcccactttctcaatgttgtccacgcccaggtgcacgcagcctggtccgatggattcacttaaaccatagttggtgtcatacttgtggtgagggaagtatttcttccagtgcttaattaagctgggaggcacaggctgagccccgatgtgcatcagacgccactgctccagctgatacatttccagatgcaggtctcctctgtccaaggcaaggagcagatcctgtgcccagggaaccagaagccatacaatggtacatttttcttcggatacagcccggaggataaattctgggttggcgccctttaacagcaccgcctttccccctgtgagaaggcttccgaaccagtgcattttggcaccggtatggtacagcggagggatgcacaggaagacatcctccttggtctgcccgtgatggctctgctcagttttggcagagtgcacaagggctccgtgagtatgtaaaattgccttggggaagccagtggtccctgaggaaaaataaatagccgcataatcctcatcattaatgtctacttttggggactggctggagcaattgatggtgtgcatggtatagtcctctgcaaaaccagggcagccgtctcccacaaaatacagcaggcggtgttttccgatttcatcagcgatctcctccacacgtccgataaattccgggccgaataccagaatatccacatccgccaggtccagacagtactgaatttcttcggcggagtagcggaagttcagaggaactgccagagctccggttttcaggatgccaaaatagatgggcagccattccaggccgttcattaataaaatggctattttgtccccctttttcactccccgctccaggagcaggttagcaaagcggttggctttttcattaaaaacattccaggtaatctcccggcggtaataagaggccctcacaggctcgatcagttcatattctttccaggtaactctcctggtctccggcatttccgggttaatttccacaagacatacatcgtctccgtagagacggcagtttttctccaaaatttcggtgataggcattggatatccccttcctcatttctttgcagaatttgctttcttatcattttaagcataaaaaaattcgcgctttaacgcgtttactcattaaagctaaatatacacaattttggtgaaaatgtcaacagttttattgggaaatccctacaaaataagaaagaaaaaaagcagtttttccaggaaaaaatcttgacattcactggggacatggtatatactaaggctaatttagcgagtaaaagcgtaacgctttaaagtctaaaagtaaaaacgattcatacaaatcgctttgagggaggaaaattagaaatgatcgtgaaactgttactgctcatcttgttttttggagtgatgatcggcgtaggggtgtactccagaagacatgcgtcaaatgtaaatgatttcgtccttggaggacgttccgtggggccatggctgacggcttttgcctatggcacctcttatttttccgcagtggtgtttgtggggtatgcgggccagttcggatggaagtatggtcttgcctccacctggatcggcattggaaatgcggtgatcggaagtcttttggcctgggtgatcttgggaagaagaaccaggatcatgagccaccatctgtcagcagccaccatgccggactttttcggaaaacgttttgacagcaatgctcttcgaatcgcagcgtccgggatagtatttgtgtttttgatcccttatacagcatccttatataacggactttccagactgtttggaatgtcctttgatattccttataccctgtgtgttgtacttatggccactctcaccggcatttacgtgattttgggaggttacatggccaccgccatcaatgattttatccaggggatcatcatgatcggcgggatcattgccgtgatcggagctgtgttaaatggacagggaggctttttaaatgcagtgaaggagctggccagcttaaacagtgatgtacctgtcaccatgggacagccgggagccttcacctcttttttcgggccggatcccttaaatcttctgggggttattatccttacctcactgggaacctgggggctgcctcagatggtacacaaattctataccattcgaaatgagaaagcggtaaagaccggaactatcatctccacagtttttgcagtgatcatctctggaggctgctattttcttggtggctttggaagactttttgacagcccggctatttatggggaaaatggggccattgcttacgatgccattattcctgccatgctttccactctgccagatgtactcatcggagtggtggtgattttggtgctctctgcatccatgtccaccttgtcttccctggtgcttacctccagctctacattgaccttggatttcattaaagggaatttggtaaagaagctgacagacaaggaacagcttctgatcatgcgaatattgatcgtgttcttcattgttgtatctgtggtattggctctgaacccgccaacctttatcgcgcagctaatgggaatttcctggggtgctttggccggggctttcctggcgccgttcttattcggcctgttctggaagagaaccacggcagcatcggtttgggccagctttattgcaggcgtgggcatcactgtgtccaatatgttcctgcactttattgaatcccccatcaatgcaggggctgtggcaatggttgtgggttttgtcatcgtcccggtggtaagccttatcactcccaaactgaacaaaagccatgtggatgagatcttctcctgctacgacgagcctgtatttgtaaaacgcaaggtggctcttccagaaaaggaagaggaggaataaacaaaaaaatggggccgacagtttcttgccggccccttctataattcaaattctacaatcctaacagctcccaggcatttttccaggcgatctgctcttgctcctcttgggtgaaggggagggcattaagaatctccacatcctccttctgggaggtccaggggcagtctgtgccgaacagaaccttgtttactccgtgttttctagccatgcgcaccaactgctccggctgcatatgcttgatggaaaaagcagtgtccagatatacgttctgccccataagcagggcttcggactggtcatagtaggcattgcttcccatatgggccagcaccagcttttccggggccacatcctgaagtacttccaggatcatctcaggagtacagtgtaccttgtccggggagtaggggtcatttccggtatgagtgatgcatgccagtccaagctcagtggttttgtacagaatgcgtttgtagcggatatcatgaaagcacacctcctggtaatctgggtggatcttcacacctcgaaagcccaggttcttgatctgggtgagcttctctcccaggtcggggcagtccgggtggatgcctgcaaaggagatcagccgggggctggcgcctgtgtcccaggtctcattgatacccacggcgaagcgcaggatggagtcaaactgacgggggtctgtgactgtgggaagggtgatgctgatgtccaccccggctttttccatggaagaagccagaccagaagccgtgccatcggtggacggcaaaatatcaacgatgccggatagcttgggcagtgccttggaagctaccttttccgggaaaatgtgtgtatgaaagtcaatgtacatataaagtacctcctgtgtaaaaatcaagattgctgcagctgatcctgcaaatatctttttatagtatacttcagatttttacgggtttcaatcaggagataaaaatgctatacttaaaaaaacgaaaaatcatatccagcggggtattccatatcttagggctcattgggcaatggcggggatgcgcctcacagggtatagaatggccagatggattgtaatagaaaggaagaagaaaatatgatcaagcagaacattgtatttgtagaaaataaggcgggcagcctgaagaaggtgaccacccttcttgcaaaggagggggtaaatattttcggctttgcctgttttgatacacctgagtttgccattttccgtatggtatctgacactccggagagggcagaacaggtgctgacacagaacggatacatgaaccggatcaccgatgtgatcgtggtggacttaaaggatgagatcggcggcctggacgaactgctcagcgctttggctcagagcaatatcagcctaaactatatttacacctcgttcagacgtgagggacagattccggtggttattcttcatgcagaggaggcttatgctacagagagcgtgcttaagggcagaggctttgccgtactggagagcgtggaagagctgaaccggaagtaaagatacctgaacatgccgaaaaaaaagctggaggatgaagtaaaaagtccttcagtttctttttattatttagaaggactggccccaaaaaggcggccgggaaaaagaaaagagaaattaggaggcaggcatgtataaaatattgattgtggaagatgaccaggtgatcgcaggaaccttgaaaaatcatttatcctcctggggttaccaggtggaatgtgtgcaggatttcagtaatgtgatgaaggagtttgtggcctttgatcctcagatggtgctgatggatctgtccctgcccttttataatgggtatcattggtgtgatgagatccgcagaatctcccaggtacctgtgatcttcatttcctcagcgtcagataatatgaacatggtcatggccatgagccggggagcagatgattttgtggcaaagccctttgatctggacgtgctggtggcaaaggtacaggccatgatgcgcaggacctattcctttggggcacagagcaatatactggagcacaagggggccattttaaatatgggaaacaccactcttacctatgagggagagacggtggagctcaccaaaaatgatttccggatcctgcagattctatttgaaaatgcaggaaaggtagtctcccgggattcgattatgactaagctgtgggagagtgacagctttattgatgacaatacccttacggtaaatatgacaaggcttcggaaaaagctggaggcagcagggctgaataatttcatagttaccaagaagggactgggatacatgatttgatctggcagctcatagtttgatcagaacaggaaaaggggataaggcagttaacatgtggaaaagtctttgggattatttcaggaagatgtggaaaatcgttgggattttcttgctgtttggaggaatttttgcattggtgctgattctttacggcattcacccggaaccggtgttatatgctctgattttgtgcggggttctgggagctgtatttctagtagtggattttgtgggatatgtaaggcggcaggagcggctctgcgagctgaaggagaatcttttcctgtctcatgacagccatgacagcggtgtttttcacggaagtgaggctgcccagtatgaggccatgatcagctcccttcaggaagaatgcaagaggctggagcggcagcggcttcaggattatgaagagatgaaggattattataccatgtgggcccatcagatcaagacgcccatagcggccatgcgcctgctccttcaagcccaggagggagaacagaacaaggccctggagatggagctctttaaaattgagcagtatgtggaaatggtactgggatatctgcgtacggaaaatatttctacggacatgagactggaaaactgtgagctggacggcatcatccgccaggctgtaaaaaaatacgcaaagatttttgtgctgaaaaagatttctttgaactatgagacgctcacctgtcaggttctcacggataaaaaatggttgtcctttgtgctggagcagattttatccaatgcactgaagtataccaagacggggtgtatctctatttatcttgcgccagataaggaaaaaacactggtgatccaggatactgggatcggcatccggccagaggatcttccaagaattttcgagaggggcttcaccgggtgtaatggaagggaggagcgccgttccacaggcattggtctgtattcctcaaagcggatcatggataagctgggccaccggatttgtgttgaatcccagatgggtgaggggacgaaggttcttttgggactggagagaaaggaattggaactgctttagcttttcacaaaagaaggagaaaatataaggaggcagaaggatgttggaagaacagaagagactgtgggagcgctgtgtagtctttcacggacatacgtgcggggggcttgccattggtttccaggcggtcctgtatgcaagaaagctgctggatctggacttttccagggatgaagatgtggttaattaatattcccaaacttcgcacacaaataatacttatgtacttattgaagtgcgaagtttgagatataagaaataatattttattttttgtaaagaagtataattaattgaagtactattagtgggtttataagtaaaaagaatccaaagatacactttaagaacctcgtatagtcagttgcgcccaaaagaccgaaactgaataccgtacaaaaaatactgattataattgcaacaatacatataaaaagtctatattttttcattctaattggttcctcctattatattagattttttgtatgattataataatatatatgaattattcaagaaacaagtgctaatagtgcttggaataagtgcagttaataaaccataaatcactcttccgtttgttacagaagagtgattctcgatatggtcaaaataaagtgcgaataatttaattttaaaaagggttatgcagattgaagacttgactttaacattacgaggattacgtttataaataaatccatctattctcgatttttctatagataactcaacaataccagagagcttaggcagttattaaagtgcaaagtttaagtgatatttttacatttagtattataatcatttgtttcaatgttagaaaattacaagtagcataactattgatacgcaatttttttagatagattttctttcttttgttttaacctttcgatccaggccttgcgggatgtggtgcttcatcgctaccaatcacaacaccttcctcattataaatatttccagtcttggaatccttataagaaccctttggagcaacaaattttccgttttcatttgttgtaccaaatttttcctgatattcttttgcattttgcggacgagtaggtattttagtgggtatagcggttgattttttgtctgtttcattttcaacctgtatttgagctgttgaattggagttctgcgtattattagaatcaagttccttgttattacatccacaacataaaagtaaaagaaaaactgtagaaaaataaattattttaataaatctcatctaattatacctcaattaatgatatttagtattgcattgaatttacattttggttgaaattacccccccccacacttgaattttattattcgatgtttatgaacttatattatgaaacaactagtttcatatttcaaaattccagctaatatagaaagtgcaactgcaaacagccactttctgcggccagcagggccgcattttccggccaatcagggccatattaaacggccagttttagaaatcggcagggcagagagggggctccgccctgctaatcagtatcgagccttgtcccagaaggctatgctttctcaatcagtacggtaaatcctgtagtcaacctgcgccggattccgtcaagcttgccgtagcattccttctcatcactcagctggttcccccattcatctggagaatactggcaggtgaagagggtggaggtcccaaggtcatcccgaagctttatgagatggtacaggatcttgatcccttcctcggaatatcggctgatagcgaagtcatcaatgaacagcagctgaatccgtgcatagtacctgatcctcttacggtacttgttcagatcttcctgccggttgagaacaatcagttcgtccagcagatcgctatagtctacaaacttacagcggtaattacgcctgcatgcttccacacaacaggcagacaggaaataggacttgccagcaccggtgactccatagatccccacattctgccggttctcagcgaagtggaatttcaggacctgttcaacagtggcatcattatagatgcgcccgttaccggttttcagattctccgccacagcccccttattgatcaggctgctgagccgcagattggtttcaaaccgcttattgagggtttctatgtattgaggctccaagacctcacgaaggaactgcaaagcggtatagctgccgaattcagggctttcagacagttctgcgaaacgctgggcggctaccggcagggatagtgtgtccaacatctcataaatatcggtagtctcattcttcatgaccggcctccgtttcctgacgcttcagcaggttcttaagggaatacttgctgtcgtcatctttgaaagtgccggatatggctattgcagcatcttcgttgggtttgctctgtgacgctgtactctgcgatggctccttatggtaagctgagattgtgttacagatataggaatagctgcatttcccagccaaaacggcgtctttacagcaacgttccagggcttccggcgagtacttttccgcataccgcagaatcccaaagcagcttcggaatgactgcaccggataagcgtatttccgaatgacggcatcgatcaatgcacgggtgctggggccgatagcagacgctttctgctggaaataaggcacagtccaatagccatagtctttgtattcggcgggcatatccgaagggatgatcacccagtctttcggtgtatagctgcgcttatgtgtccggatgaggtcaccctgtttattatagacatagatttctttttcgcctgcccggatctcaagttcctgtcgaagatatttccggggcatgctataatggaccttgtcgaaggtgaaggagaaatcttgtgctactttaacagtctttcgttcaaggtattcgaagcggttggtcggaagaggcagaagagtctccttctcttctgttgtaaaaagatcgtaccgggaataagtgagtccttcaaagggcttccggttctcggcatccaccttttccatcaggacacggtttaaatcatccagtgaataaaagactatatcctccatgtccatgaggatgtgcatggtaacgatctttacgtgcccctctacaaccggtttccagcggggtgattttaccttggcgggggttaaaaccgtattgttatgctctgcccatgcctggaaatctttattcaggacagggctgacccagtccttattccgggcaactgccaccttacagttatccggcgtaattgtcggagtcacgccgccaaaataggccagagcgttattatttacccggatccagttcctgatatcacattccgtcatgccttcggcataaaagtaatcgctgtaggtgagggctgcaataaagatggtgacctttgtggtctcttccggattccggcggttatgcagatagagctgctttcccgcataatccagctcgagattgacaccgggataacgctggatgtggaaggtcagctgtttggaatcagcccattcgctgtaacgcctgcaatactggcgatagctcattggcttcttcccgtctacgacacctatggcattgtatttctgccacagatgcttcagggtctcccctttgcgggccagagctttatagacagcttctttgttaaaatcccgatagaggagtcgatccgccgatacaccaggctttttataaagcatgcttccgatgtattcattcgtgacatctgccggtaaagggtacgagagctccggattctctctgaaacgcttcagaaactcgttgacagttgttttgctgcagccgccacagctttcggcgatctcgcggccgctgagatgattcacaaagtgaagtctcaatactcttttgtagtccataatggaacctccagttataatatttctccttgaacaggagatgcttatattataactggaaattttggccgtttaatgtgtccttgactgaccgccatttaagttccagggtggcctccgaatatggcacaggtggccgttttggctggcaatctgcagcaactattaccatttcataaaaaataacattataaagtacagaaattttaaaatacaatcccactattacgaggacggtataaataattaaaatctgttttgaacgacttttattacacaatatctaattgtttctttacagtagtttgtagcttttttattcatactagtttaacctcctttaatattttatgaataaagtataccacaaacgttttgcaaaattaacggtttgtaaaaaaatgactataattttgacaaatttagacagcaacagctaaaaaaaattagagattatttccttcataataagtatgtgtatattgtattttaaaattaatgctttatgaaaaaatgatttgataaatgaaaaaatgatagtatttatggaattggtttcatgtcaaatactgagaattacggaagggtcatccgacaagtaaacatactcatgcgataaaaccgctactccgaaagagtaaaacagaatgttggtttccatcaatttggaactacggcttacgttttccggattgacagtgtaaaattacttgttatatcaataagttgaaatatacaattgtataggctataattattctgtattagataaatataaaagtacttgtactttaaatctattattggtataatttatattcattgttcctctatttgattcgattattcttttgacattttcaagcccaataccatgaatagagatttctttttgtgaggttataagcttgttgtttttctgaacaatgttaccagaataactattttctatattgattaatagaacacctttttttgattcaatatttatttccaagtacttttcttttgacttactggcctcacgaattgcgttatccactagattgcctaaaatcacgcaaacattaaaatctgtagttaaatttttttctggtatattgatttttattttaatacaatcaagaagatcatcaacattttgaagtaaataatttaatattccatcaacttctttattcccagttgcaacatgttccttgggatttagcataaaattttccatgttctgtaaatatcttattgtttcctgctttttatctctatttatcatggagcgtaattcgataatatgatgttttaaatcatgacgcaatgaatttacctgttcctgggactcctgtatgatattaagttgataagcatacacgttcgttagttgttcaaacattttcttttctatgtgatcagaatagaactctacaagggaattgtacaaataaaatattataatatttacaaacagaataccagaagaaacaaaagttattgtcatttttagttccgttgcggacataaccatacagtatatacatgcgatacttataacagggataagtcctaatattattctataaaagataggtaaatcagtatcactttttgccttgattgtcttttctagtataattgtaataaatagtatgattaagctggtgatacactcatacacctgattgaaaggcttgcctatagtgaattttatcagtggaagaacgactatactgtcaactaaagcatttacaatatagatcataaagacaagcaagagttttgtggaaaatttacttctatatggaagaataattatcaataatgcaattaaatttgaaaaaatattaaatgcaggagacataaaatattcatatattgcacttgttaaaaggcaagcggtgacatagagtatccacatatgttttatgcggcattcactttttgacaagaaaatatcgataatccgctttatagcgtaaaatcttactccgtttgccagaaatccaagtagtaagttagtgatcattatattcattcgtttccctttctaatatttctttgcgtatggatgctctattcaccctgctgatatttaaagtatcgccatttagcatttttacccattcataagtatactggattacatagttgtaatttatcaaataggatttgtgaatgtttagaaagatgttttttggtattttcttttgtatattgtccaattttccataaaactttttgatctctttattcattacaatgtttatctgtctgcctgtactttgaaaatataaaatgtccctatacggtattcggtagatttccccattactctgatactgaaaataagcattactcttaagagtaacttgataaatattgtcaagtacctgatatatactttgctctgtcaggggcttaacaagaaaatcaaatggtctgtttttaaaaagttgaagtgcatagtttttctttgaagagatgtatataataaaaatatgctcgttctctaacactcttcgtatataattacctatcatgattccgtttatgccaggaagctctatatccaggaaaagaatgtctagattttctcccctatttaaccatgcgttcaatgcgtctccactaaagaaaatgtccacatgtagtttaacaccccgttccaaagcataatttaataatatgttttctaattctgcacaagtacttttttcgtcatcgcaaattactatattcattagagttccccccccctattattttatatagtttttggttttggggttgtacacaaaatcctttatataggcagtgtatatgtgtactatgaggatagtatacatcctcagacaaaaaaagtcgagagtttagagttatatatactgagtatttcggaacgaaagtgaaatgtgtgttaattcagacataaccatgaatgaaagtcgattgtattgtgggatgggttcctgtagttgtcagcactgtgcgataaaaccccatgaggtttagaagaaaaaacgtacaaatttagttataattaaaggcgtaaaagttagctatgaggagcggatttgttattatgccaatgaggataaaatgaagttcaaactggggcaatgtcatatgaaaacttattaaatgcaaggaataccgattatagaatgtaggttatttttacattaaatgatattgtggaaatttgcaacaattaaggattataccaggtggaacttgctagattatttcgttggggataagctgatatttcaaataaggtctcaacagatgcctatgttggaagaaaaatccctcttgacaaaaggaaaaaagaaagataaactaataaaaattataaaaaagcgaggaatgtttttgttaacggtatctaggatggacaacgattaactgaatgaaggagatacagaggtggtctggcatacacaggctttccttttgtgtactcaaatccattgtagatattgctgataaaaacagaactttacatacagactggaagccagagacattggtgagcttatgttcccagggaatgttctccaggtgtcttcccgggcacagggtgaacaataccactggtgaaagggtctgtgtgcagtgagccaaaaaggtgagcctgtgaagcatgttcaggaatggatgcttcacaggttttttattgcacagaaagtggtttttttgtgattggtgttgtccatcctttttcagacaaaaaagtgcgccgttacttttaccaggaaaaacggtaacacagaattatagaattgaaagggaaacggatatcatgaacaatacatttgaacttttaggatttcaggagataaaggaacggctggcagaatgtgcagtgacagaacagggaaaaaaccaggccagagagctgtccctgtgtttgaaggagtctgagcttaagaagagactacgagataccacccaggccagacagatgctgcagttggccggcagcccgccgctgcccttgatgaagcaggtggaagaaaatgtaaaaagagcggtaaatggagaaatgttgctgccggaagagattgaggaggcagggtattttctggtggctgtacagaggcttaagacctatttggagaagggaaaggaccatgagatcagcctggcctactacagcgaaaatctgaagggagaccaggagttgtacgaagacattcagcgttccatacgaagcggacaggtggaagattacgcttctcctatacttggccagctgcgccgccaggctcagaacctggaggaaaagataagagaaaaggcagagcaggccctgcggtccgccaaatcctacacggcggactcctatgtggtgaacagaagcggacatatctgcattccggtgaaaaaagcctgcagaggaaaggtggcaggggcagtcattgaccagtccgccacaggctctacactgttcattgagcctaaggctgtgggaaaattttgcggtgagctggagcttgtgaagattcaggaggacacagaggagcgcaggattctgtatcagctcacagacagcatagcccagaggcaggagcagtttgtggaggatatccgggtgactgccatgctggactttgtatttgccaaaggaaagctgagcttggatatggaggccgtggagcctgagctgaacgtggaggggaggatcaccctggaaaaggcccgccatccccttctggacagagatgtgtgtgtgccccttgatctttccataggaaatacaatccgggggatggtgatcacaggtcccaatactggcggaaaaacagttgctattaaaacagcaggcctccttacgctcatggcctgcagcggccttcatattccctgtgacaggggagagatttctatgtgcagccagatcctgtgtgatatcggggacggtcagaacctgcaggataacctgtccaccttttccgcccacattcaaaatattattgagattttaagaaaagccacaaaagaaagcctggtgatcctggatgagctcggttcaggaactgacccggcagagggaatgggaattgccattgcggtgctggaggagctccgccggcgggggtgcctgtttctggtcactactcattacccggaggtaaaggaatatgcagaccgatggccggaaatcgaaaaagcccgcatggcctttgacaaggaaaccctaaagcctctgtaccggctggaaatgggaaaggcaggggacagctgcgccctctacattgcaaagcgccttggacttccaaagggaatgctgctcacagccgccaaggaggcctatggtgaccaggactgttcccgtctggtgaaggagctggacctggagggggaggaagaagctttgaaccgggtgtcagggcccagaattatcaaagaaaaggccctcacgggaaaagagataactgctcaacagtttcaaattggagacagtgtgaccgttcttccggagggaaagattggaatcgtggcaaaaaaacaggacagccagggaaatctatggatccaggtaaaaaaggagaaaattctggtgaaccacaaaagagtcaggctgctgatcccggcggacagactttacccggaggactatgatttttccataatcttcgattctgtgaagcagcgcaaggcccgccaccagatggaaaggaaataccagaaggacctggtcattgaagaggaataaaagaataccagaaactgtaaaaagtatcacttcccaggaggtggtactttttttgatggtgtgcccggcgggcgcacgttctaaggggtgaaagtccctgatccgcccggcagtgggaaggatgcagccaaaggcaagggcgtcactgtgaggtggggtctgaaggaagccggaggcaaaacactggcctgtaaaagttgtccggataggctgtgaagcgtggatgaggttgccatacaaaccaaagtccaataactgcacggaacgccagcagtagacggggcaggtataagtgggaaagagcgtgtgagtacccggggaggtctcacggacgtggcagaaacgataaaacattcgttaccacggagtaaagcttgccgtgagaagtcagcagaagccatagtgtgcgacttgtaagtcgccatttagattgtgtgtcaaaacactactacttccatttcgtagtattcctaccgtaaagtgcctagtaagtgatgaacggtgcggagcaacgggacaacgtgagaaaggcagaatccacatctgccctattgcaaggaaaagatgtgcatggttaacatatgtgaactgtcgcaagggtcgtcagtctgatgaaaggtgaaaagtggatgatacaccttgactaaaatagtgcggagtcggggacatggtaattactatgatgccgtgccgaaatggacagagaactcccggcctatagacagaacctaaacacatcatagttatctagatggtggaacaaggtaaaccttatgcgctcccaatgggtaggccaatcgcaagagaggtacaatgcgcagaaggcagaggatattggaaaaagcgaacgtctctgtgtaatgcagagaataagggttcaagatttgccctatccgaaaggaggcagacttccaacgcgtatcaattacatgaaggaattggaaactgtgaatgtatcaggttcaattacacaatcgtgaggacaatacagacatgaaacttaagtggaaccagattgactggggaaaagcagaagagcaagttaacagactacagattcggattgtaaaggcaacattggaacaaaagtggagactggttaaaaggctccagcacttattaacgaactcattttacgcgaaagcactggcggtaaaacgggtagttaccaataaaggaaagaatactcctggtatagatggagaattatggaaatctgataaagacagagttaatgcagtacgaaatcttgatacacgaacttatcatgcccgaccattacgacgggtatacatagagaagtttgggaagaaagagaaaagaccgttgggaatacccactatgagggacagagccatgcaggcattgcagcttcttgcgctggaaccagtagcagaaacaaccgcagacagaatatcgttcggcttcaggagatatagaagcccggaagatgcaagagaatacgcatttagtgtactcagcaggaaagactcaccgcagtggatactggaaggagacattaaaagctgttttgataaaatcagtcatcaatggatggcagacaacatcccaacagataaaaggatcctaaaggagtttacaaaatgcggttacattgaaagaggacgaatgtttccgacggatgaaggttcccctcaaggcggcgtcatctccccaacctatgcgaatttggtgctggatggactggaacctatgattctggatgtatattggcggagcagggttaagaaaaccttcagtgttaaatacaataaccataaagtccatgtggtaaggtttgctgatgattttatagtcacggcatccgatagggaaacactggatgaaatcaaacaaatgatagaagactttctaaagccaagaggactagccttatcagaggagaaaacggtaattacccatatagataatggttttgattttctgggatggaactttcgaaagttcaaagggaagctaattatcaagccgtcccacaaatccatgtgcaaaatcacacgaaaagtcagtgaactgattaagaacagccaaaccgtaaagcaagagaacctaatccgcaagttaaatgagattacccggggatgggcgaattatcaccactccacctgtgctaagaaatcctttagtacggtagaccaccgtatatgggaaatgttatggagatgggcgaaacgtagacatccaaacaagagtaagcattggatagttgataaatactggaaaacacataaaggaagaaagtggacgtttatgacagataagaacatcctattcctgatgatggatatgccgatagtccgaaaggggcaaatggcacttgataaaaatccattcctcgaccaggagtactttgaaaaccgggcaaagaaacaccgtcttaatagaaagaaagcgatatgttccaatcgagctgcgcagataaattattatgcgttatagatgcgtgagcggaatgcggtgaaagctgcacgttccgttctttggggagggaatgactgcaaggtaattcccttacccgacaagccagtggttgcaaacactggacgaagggctgaacaataggaggtgtcattttcaaatggaaaccggacatggaaacaagtacagacaacttcgtatagaggactacctgcggaaggtatctgcggaacagaaagagcaagcaggagtgtacgcccatgaaaggattaccggaaaccctggcaccaacacggattttaggacggacaacctgttggatacgattcttagaagcgacaacctaaacgccgcctataagagggtcaaagagaataagggagccggtggtattgacgggatgcaggtggatgaacttctgccctacctgagagagcaccaggccgagatagtggaacaggtgaggggaggaaagtataaaccgaacccagtccgaagggtagaaatacctaaggaggagaaaggaaaattcaggaaattaggagtgcccacagtagtggacagggtaatccaacaggcagtcgcacaggaactaacccccatttatgaggaacagttttcagataacagcttcggtttccgctccggcagaagcgcacatgatgcattggcgaggtgcagggaatacatcaatgagggatatgtatatgcagtcagcatggatttacaatcctactttgacaccgtgaaccacagcaaattgatagaggtgctgtcaaggacggtgaaagatgggagggtaatctcactgatacacaagtacctgaatgccggggtcatggaggacgacggattccacacgacaccagagggcgtgccgcagggcgggccgctgagtccgttgtgtgggaatgtgatgctgaacgagctggataaggaactggaacgaagggggcacaagttcgtgcggtatgccgatgattgtctgatactatgtaaaagtaggaaaagcgcagaacggacgttggagaacattatgccatttatcacggggaaactatatctaaaagtcaatctccagaaaacgacagtgagccatgtaagcaaaataaaataccttggctacgcattctaccgatataaggggaaatgccggatgcgtgtgcacccgaaatcggtggagaaaatgcggaataagctgagggaactgacaaccagagggaacaaatggagcaataaggtaagagaagaaaaactccgaagctacgcaagtggatggataaactactaccggtatgcggacatgaaaaacctgatggaacagacggacgaatggctgcgccatagaatccgggcaatatactggaaacaatggaagaaggtgcgcacgagatacaaaatgctccgggcgctacatctgccaaagtggaaagtacatgaaatggcaaactgccggaagggagtgtggagagcggccggaatgctaaactctgcgctaacaaagacaatcatagtggacagactcggatatccatccatgtcagcccactatctgaaagttcgtgtaaactattgaaccgcgtagtaccgagcggtacgctacgtggtgtggaaggggagggtaaaatctcccctatccgatctctcaaggaggtaatctatgcgattagtaattgcagaaaagcccagcgtggcccgcagtattgcggcggtgatcggggccacggaaaaacgggacggctacatggagggaaacggctatctggtgagctggtgtatcggccatctggtgtcctttgccgacgctggcagctatgacgagcgtttcaaaaaatggcgctatgaggacttgccgattatcccggaggaatggcagtacatcattcccgacgacaagaaaaagcagtttgacaccatccgggaactgacccagcgccccgacgtgaacggcctgatctgcgccaccgacgccggacgggagggcgaattgattttccgttttgtctaccagatggcgggctgcaccaagcccttttcccgcctgtggatttccagcatggaggacagcgccatccgggagggctttgcacagttgaggccgggggccgactacgacgccctgtatcaatcggcactgtgccgttccaaggcggactggctgatcggcatcaacgccacccgccttttctctgtgctgtaccacaagaccctgaccgtgggccgcgtccagacgccgaccttaaaaatgttggtagaccgaaacgaggccatcaccaatttcaaaaaagagaaataccacatcgtccatatcgcggcggacggcatggaggcggcggggagccgccttgccagcgccgccgaagccgacgccatcaagacggcctgtgcgggagcgcaggccgtctgcgtttccatccagcgggaacagaaaaccgagcagccgccccgcctgtacgatctcaccaccttgcagcgggaggccaaccggctctttggatttacggccaagcagacccttgactacgcccaacagctatatgaaaagcgcctgctgacctatccccgcacggacagccagtatttgaccgacgagatgcagcccacggcagaaagccttgtgtccggcctgtggccgctgctgccctttgcggcgggactggatgtttccccgcagtttggccgtatcttgaacagcaagaaagtgagcgaccaccacgccattatccccacgatggagtttgtgaagcagggattcggcgggctggccgagagcgaaaaaaagctgctgtccctgatctgctgcaagctgctgtgcgccgtggccgcgccccacgtttatgagtccgtcaccgccactttcgcctgcgccgggcaggagttcaccgccaagggcaaaaccgttctctgccccggctggaaagagatcgaccgccgtttccgggcctctctcaaaaccgatgccgacgaggaagccgaggcggtgcgggagctgctggagctgtgcgagggccagacctttaagaatgtggacgcccaggtcacggagcatttcagcacaccgcccaagccctacaccgaggacaccctactttccgctatggagcgggccggggccgaggacatcccggacgatgccgagcgcaaggggctgggaacccccgccacccgcgccgccattctggaaaagttggtgcagatgggctttgccgaacgaaagggcaagcagctcattcccaccaaggacggccacaaccttgtctgcatcctgccggatgcgctgacctctccggcgctcaccgccgaatgggaaacccgtctgaccgaaattgccaaggggcaggccgccccggagggcttcatgcaggacattgaggcgcaggcccgcgaccttgtggcgacctatcaccagatcagtgaggacggccagaagttatttcagaccgagcgcgtggttatcggcaaatgcccccgctgtggcgaggccgtctatgagggaaagaaaaactatatctgcggaaaccgggcctgccagtttgtcatgtggaagaacgaccgattttttgaggaacggaaaaaggcgtttaccccccaaatcgccgctgcgctgcttaaagacggaaaggcaaaggtaaagggcctctactctgtgaaaaccgggaaaacctatgacggcacggtgcttctggccgataccggcgggaagtacgtcaactatcggattgagcggaggaactaaaggagtaacgcagcaagcatagggagtgtggctacactcacggaaaatccccgttccggctgaccctgccgggccggggattttgtttgttggggaaagccccaaacccctttttcagaccaccaaagaaaggatgtgaagtatgtcttacagctcctacgaccatgacagcttggaaaccgcaaataccatgcagatcaggcgcacgatttactttgaaagtgaaaaatcagatatttccgagctggccgccctgccgatggcagagcttcttaaaatgcgggaggaaagcgccgcagcggaacaggaagtgtttgaccgcctaaagaaacaggccgtcgcatgggaggaacaggccggaaaaaccctctcccttaacaaagcccttgagtatgtgcggacgccccccgccaagcacacgtcgaaccagtgggaaacgccggatgaataccgccatgtgcgaagcaacgccgtttacaagatgtcctacgctatttccgagaacacccggtatgacagtaaggcgcagaaatccatcacatactcatggacgctgcactgggccatttttaccaacgcgccgggcggctaccggcaagccaaaattgccgggcaagatcgtaaagtctttgccagccgggaagaactggacaaatatttgaatggccgtatcaaggcttaccagcatttatttacggaaatttccccgaccatccccaaggagtacgccgactatttcaaggtgaacggccttttgcttcctggctacactgtcgagggagaagaactccaacaggccgccgagtttccccaacaggtagccggagccgggaaagatcagccggagccgcgtccagccatcatgcaaccagaaaggagtgaacgaatgagcgaggtgttttccatccagctccacaaccgccagctttttcagcagggccagcaggggatttggctggacttacccaccacagcagaacagctacaagccgccctgcggggaatcgggatcagcaccgacaacccgcaggatttttttatcaacggctattcttacccggaggacaagcgccttgcactgccctatgacatggtgctggccgctgacgtggatgagctgaattttctggccgcccggttgggccagcttccccccgccgagatcggggagctgaacgcggccctgcaaaatcccaagggcggatttgaaaatatcagccagatcatcgactacgccgacaacgtggactactatgtgcatctcccggacgtgcagaccccggcgcagttgggtgactactacttgaaccgctccggcatggtgcagatgccggaggaatggaaaagcggtgttgacccggagaaattcggccagcatatcgcccagcaggaacagggggcctttaccccatacggttatctggtgaaaagcggcgacgagtggcagcgtgtccatgagggccagcccgtgccggaggaataccgggtgatggcgtttcccgccccggaaaccctgcgggacgaaaccatcccccaacaggcggcggaacagcccaccgagtccccagccccgaagcccgttgttcccctgatcttgaatggccagaacaacgccgagcgcatgaaagagatcactgaccggctggaaaccggcatacaggagcttttcgagagcgaacgctacaaagcctatctcacctctatggcgaagttccacagctacagcttcaacaatacgctgctgatcgccatgcagggcggcgagttggtggcgggctacaacaagtggcgggatgaatttcaccgcaatgtcaaaaaaggggaaaagggcatcaagatactggcccccgccccgttcaaaaccagaaaagaagttcccaagctggacgaatacggaaagccagttatgggccgggacgggaagccgcttaccgaaataaaggaaattcaagtgcctgcctttaagattgtgaccgtgtttgacgtgagccagaccgagggggaaccgctgccctctatcggtgtggaggaattgaccggcgacgtggaaaagtatcaaaacttttttaaggcgctggaacagacctcccccgttccaatggcctttgaggacatccccggcagttcgcacggctactaccacctgacggaaaaacggattgccattcaggacggcatgagcgaattacagaccctaaagaccgccatccatgagatcgcccacgccaagctccatgccatcgacaaggacgccccggccaccgagcaggccgaccggcccgacagccgcacccgcgaggtacaggccgagagcgtggcttatgccgtatgccagcactacgggctggacacgtcggactactcttttggctatgtggccgggtggagttccggcaaggatttgaaagaactgaaagcctcccttgaaaccatccgggccaccgcccatgagttgattaccaccatcgacggccaccttgccgagcttcagcagcagcggcagacccagcagaccgcagagcagccggagcctgtgaagcaggccgccgaacagcccaacccggacagcgtatttgccaagctgcccccagagcagcaaaaagagcttaccgaggaagtgcgggccaccctgcaaatgctggtggatgccgacctgaaaagcaccggcgaggtatcgcaagacaccaaggaggccatacagacgcagggatttactctttccaatgatggaaagctgcaacaggccgacgccccacagcagcccaatttctccatctatcagcttcgcagcggtgaagaaacgcgggactatcgctttgaaccatacgaccgcttgcaggcggcgggccggtcagttgacccggccaactatgaccttgtttacaccgcgccgatggaatcgggaaccacgctggaggacatttaccgcacgttcaacatcgaccaccccaaggacttcaccggccacagcctttccgtttccgacgtggtggtgattcgccgggacggtaggcaggaggcccattactgtgacagcttcggttttcaggaagtgccggagttcttcatccagcgggaaaagcagcttgcgccggatgccttactgaccggcgagcgcatccaaacgccaaggggcagcttccatgttacggccatgagccgtgagcagatggaggccgcaggctatggttttcaccatcaatccgaggatggaaagtatctcattatggggaatggcacacaagcctttgccgttgttgtccaacaggaaagccccatcaaggccgctgaaatgacgaccgagcagaattacaacatgatcgacggcgttctaaacaacgcgccctccgctggtgaggtggaggccagagaaaagaccggcaagccaaaacagcagcgcaaggccccggagaaaaagccctccatccgggcgcagctcaaatctggccgggaggaacaggccaagaaaccaccggcgcgggagaagtcaaaggaattggaggtgtgaggccgtgaacaagtttgaaaatgtggacgtttttgccgcgttggaacagatcatgcgccagaacaccgccttttatcaaagcgactttgagatcgacaaagagattattcagcgggccgccgccagtgaaaaggccgaggacagggtgcttctgtggatgtcccggccagccggaacgtactgctttcgagagcgcgacgttttcctgaaagatacccggcagcacaacacatggaaattttatggggagcagacccatgaccgtattctggcctacgctgtggagctgactggcacagatcgcggcaaggtgcggggcaatctttacgagctggactatccccagcacttccggcacgtcatagccgaggcggtgcgggccgacaccatcaccctgtattatgagaacggcagccgggagcaaccggcaagccagggctttgacggatcaccagaccccaagttgggaaagttcctccgctacgaggcccagcccgacgagctggacaacctgcgggagcttttgcggcaggaacaacgcggccatgaacagctaaagccgggtgacttcaaagcccacgttgcggccctacatgacggcctgatcttgaccgaagcccagcgcatcgtagctgaaatgaaagacctgtacgcacccaacagccccagcaagacgcatttcatggtggagatttcgcctcgcttcacacagcttgcatccaccaaggacaccgaccggcttttttctatgctgtcctacaagtccctgtccttttccagcttgaaagaccgccacggcgtctatgcgctgatcggcggggacgagaaccgggacaaggaggtgcggcggccccgcgcctccatccgcaggcagctttccgacggcaaacaggccgcagccccgaaaaaggccccggcccgtacaaagaaaaacgaattggaggtatgacgatggtacacttgaacgtagaggaagaaaacctgatctgcattttccaggatgctgaccggcacaggacggcggccaacatcctggccgccctgccagacatggacgagggtatgcaggtgctggcccgccagaccgctgacaagctggatgccatgagcgacgccgactttgagacgcggcagttccatttcacggacgagtgatctaagcatagcaaagcgccgggcgcgggggctacatggcctctgcgtccggcttattttatttttccatagtcaaaatacagtttaccttttccatctcaaagaaattggcagtatagtgaatgaaagctaaacaatggttagacgaagctctaatcagattgttcagcagcgaaatattcttctcttgctgtggggataatgatgacatttcttttttgatttctggtgttgtagatacgtttgcataaagcatgagctttccaataattccaattatcacatctgaaagttgaaccattctgttctctatagatttgacaaaagagaaattatgtaattcatttccgttcaggataataggtgttgaacagatttttcccataatctctgtttcttcatcaaaaatatgttcagaatttgggaacatatatatcggttctatatataaactttcgtatccgtccataagcataaggttttcattatctgtcaggaaacaaaggtttttcttttttcgtgcgctttttagaagctggcgtacagattccagcgcaaaatcgtcagcctcattttcaacttcgattgcttctatccaaccgattagtacctcgcaaaactctcgcacattttcgtcagcaatgttgggatagccataatgtaaaaacacttcgtggatataatcaatatccgcgttaatatatttgtataacgcatttttcatgtgtgtaatatattcccatggcagtccagataaatcagtgccggctattaaagaatccacaatgtcaacaacgccatagtatagattgttcatggacataaaatgaatgtatattttgttttccattatccactctaaaagagtttgaagtttacgggaatttacacattcaaggaacgaattgccgggtgcaatgtgtttgcgcttaatctctttcatagttggctgtaatctaagtgattgcagcagattttccatatcaaatgccttgtgttttccctcaaaaacaaggccacccaaaacaaaatcctcgtctttagaaacattaaaatccgtttccgttatccgaaagagccgagaattattagtctcatcatagaaaaacgtatattcaccatccatgtgcgaaagcccagagaatgctatggtcatttcacgaatttcagaaaaatctattgaagctgacatagaaccactccctccattatattgatattgcctcaatctcaacggaaaaattatagcacactttctaagtttcatctattaaaaagccagacgcaagctactacataactgcgtccggcgtattttctttttacctatttctacgcatttagagcagcgtttcgacaggtatatgataaatcatcccaccacccctgcaactatgccggaaaggccccggaataccgggctttttaaggccctaactgcgtagattgcaggtatcttttccgctgcctttcagcctcttgcttccggcgcatccgcacagcgcaggccgggcagtatttggcccggttggacttcggcgtgaacgtggccccgcatacggcgcagcatttcacgccgtcccggctctccatcagttcggcgcacagggccgtgtccagcgggaggactgcggccttgaaccaccggcacagcagcgaataggaaatgctctgcacacagacacattcctccccgttgtccagcaggaggcagttgccgcagtcatagttgcagcactcccgcaccagcttccgggcctttcggtattgggggtaattcattcgcggtatcttcatcgttctggcgtcctttcctgttgttgcggcgtcccgcgcaaaatgccgtccacattctgcttgatgacaccgtattctttcagcttctttttcacttcaccgtactgttcatacagccgttccttttcctctgtcagccgcttatactccgtttttagcacagccagatcgggcagcttcgttataccgctttcttttaatgcccgcgccgccgcttcatgcaaaataagttggctttcatgcccacgtctgaactgttctctgccttttgccctgcggtattccagcgccacgggccgggtctgcttatagatgctgatgttctttatcaacacggccatatccgcaagacggctttccacatctttgagcgcggcggcggcttcatcgtttgccgcacgaatcccggccaccttgctttccagatcggcgtaggtttcaattctgtgttctgtgataaagttcatggtcttggcggcctgcttcaagttgtgcagcttcgcccaccgctcatagcccgccgactgctgggccttgatgctgctttgaatatcaatgagcagagaaattcccttgcgctcctgtttgggcttgtggaggacgggcctgcctttgatgcgcttggtgatcgcttcttcggtgtaggcttcgcccagcgtcttacagcgggtaaagcgttcctgtccgggggcgcggaacgaaataaacttgccccgcttgatctcatagccctgcgccgccatgagccgcaggaagtcgtcaaaatctttggcctgcggaatggccgtatcaatagcggttttcagctttgctttccagcttgtaccgcgccgcccggcgtcccattcggcatagcttttgcccttactctgaccgggtttcaccacggaaagaccgtgatccctgcacagcctgtcgctggtgcgccggatgtaggcatagctctgtttgttggaaatatatttgcgctgattcaccatatccaccgcacagaaaatgatgtgattatgaacgtggcctttatcaatgtgagtagtcagcacatagggatatttcccttgcagcacttcatcggcaagctgccgcccgatctcatgggcctgttctggcgtggcctcgccgggggcaaaggactggatcaggtggtgtgccagattgttgcctttctggtacgcctgcgccaacagcatttcaaattcaatgtccgccgtttcataggagcagtcaaaggaggacaccagcatcttttcatcggttttggccggattttcgatgtagtcaagggcttttttcagcgttgacttgacaggatgtatctttgtaattgccatatttcagccagcgccccctttatgtcctccacgtcctgcgcgtacaccggccccagcgcattgagccgctttgcaatctgattgacgttgacgccgatcttttgcagcactgcggtttgggccttgatgtcactgtggtctacgttgataatgtagccgtcaatgagcagcttccgggcgtaggcggaaaagttctttgtgtggagctgggccattttctgctggatcaaggcccgttcttcctccgtcaccgggacgcgcagcacaatgttccgtgttcggttcgccatgtttcaccgtcctttctcacaggggtttggggacttccccaacaagcaaacggccacggcccggcagggtacggggcgggctgttttccgggagtgtggctacactccctatgcttgctacgttactgtttcttcgtctataaggcgtttcaggcacaaaaaaatgcccgcaaaatgcaggcagaaaagaaaaatggaaaagaaaaagaggatgttcacacaccctccgtttcttttcccgactgttcttcaattttgatggccccgtcgatggccccctcgatgatcggcaaatactgttcgggacacagcttcaacttgtggctggcccgctggcgctgttcgctgccctccggctctgcttccgggtggaagtagcgttccgtggggagcttgcatatctttaccagctcatacagtaccgggatgctgggaagatcgccgctgttctcaatattcgcaagatatcgggggtctatattcacccgttcggctaatgccctgcgggacaggcccattgcctgccgcgccgctttaatatccgcgccgagcgtttaaaagccgggataatcctttgctttcgccatatcacatcacccatatacattctataattcatagtgtgtgacgggaatgatggaatatgcactaaacctaaactttataattcatatctttcagagagtaatctttatagaatctttagaaatgccatgtattctattccatgcaattagcagaaaggagttagtcgttatggacttaattttgaaaacaaatgccctttgtaaaaagttcaagggacagatggcagtaaacaaagtatccctgaacattccccgcaactcggtatatggcttattagggccaaatggtgctggcaaatccactacattgaaaatgattaccgggattttgaaacccacatttggcacggtaacatttaacggccagccttggagccgggaggcgctgaacgagattggcgcactgattgagatgcccccactttatgaaaatctgactgcgagagaaaatctgaaagttcgcaccacactcttaggactgcctgaaaaaagaattgatgaagtgctggaaatcgttcagctcacgaatactgggaaaaaacgagccgggcaattttctctgggtatgaaacagcggcttgggattgccaacgccctactgaaccacccaaagctactgattttggatgaaccgaccaacgggcttgaccccataggtattgaagaattgcgggaattgattcgctctttcccggaaaaaggaatcacggtgattttgtccagtcacattctttctgaagtacagcaggccgccgaccatattggagtcattgcaaatggtgtccttgggtatgagggacagctccagaacggggaagatctggaacagctctttatgcaggttatcaagcaagttggaaaggttggtgagtaaaaatgggcagcattataaaagcagaacacttaaagttcaagcgtacatttggtataatccttcctgtgattgcgccaatggtaacactgctgttggtactggctttaactggcggcttggcagatgcttttcctgccggagcatggaattggtggtatgccaccttattaccgggaacattggctgtgatgtgttatttgagcgtagcaaaagacagaaaaaaccgctattacaatttgaaaagcctgtccgtatcgggacggaaactgatttttggcaagatgatataccttgcgttagggctttttgcagcaaatgtaattatttttctgggcgcaacaatcggtggagttatcttcggttcgacaatccctgttggcggtgcagcaatggcaacaatcctgctgacactttcttatctgtgggaaattccggtctacttgtttttgagtgcgcgattcggtatgtttgcagacatttttatctgtatggtgatctcgattggcggcgtagcaaccttggctgacaaaggctcttggtggctttgtccgtcctctatcccggtacggttgatgtgtcctactttgggactactcccgaatggcttgccaattcctgccgaaagtgagttgtggagtacccatgtaatcttaccgggtatcatgctctccttggcgtggtttgttgcgtgcgctgttctctttgcaatttggtttgaaaagatggaggtgaaataacttcatgcttttttcttatctcaaggcagattttctcaagacaaaacatctctccatacggactgcccatctgctcataccgattgtgacgcctttaatttttatcgcgtactattcttatgctccgtgggacgattatgcgaaagttgatatttactatcaggtacttgggatggcgttaccgtttttgattgggctattctgtgcaatcctatcagagcaggagcaatcggctggctattttcaaacgatgttaatgtcaacccaaaaagcaattccgttcttgtccaaacttctgttgctcctgatgttttgtgctggggcgcttctcatggcatctacgatctttggcgtagcatttcagtttggattgcacggcaaggcggttgaatttgcgttctatccgcttgccgctctggttatgtttgtgagcagcataccgctgtatctcctgcatttgtatttatcgtttcgcttgaataagggagtgtccatcggtttggggattgtagagagcgtgttatcggcgcttttccttactggcttgggagaacctatttggaaatatgtcccttctgcgtggcccgcaagggcagtaacaacattctatgccgcacataacggcgagatggccgcttgtgtggaattaaagcaagtggcttgtattggctttttcgtgatcgtaataggggttattgcctatctattttgggcctgccgctgggaaggctcccgaatagccgattaaggtttactctgcgctgaaaagttactataatcatagaggaggtgagaaatatggcatctatcttggcggttgatgatgaagcgggtattctggatatgatacaaagcattttgagtaaagacggacattctgtaaccgggattaccagcccagtagacattgactatacaaaagtcagttcttttgatctgattttgttggatattatgatgccgggaattgatggatttaccctttgcaaaaaattgagaaatcaagtggattgcccgattatttttctgactgcaaaatcagaagaaaacagcttggtgaatgggttatcgctcggagcagacgattatatttgcaagccttttggcgttatggaattgcgggcaagaatttccgcccatttgcggcgggagcaacgggaacattctgtccgtatctcgtttgaacattccaattttaatatttccgcaaagcaattttcagtcaaggatgtagttgtccctttgacaaagggagaatatgaaatctgcgagtttttagccagaaatcagggacaagtattttccaaagaacagattcttgaaaatgtctttggctttgacagtgaaagcaacgacagcaccatcatcacgcacattaaaaacatccgcaataaattgcaggaatttggctatgcgccaatcaagactgtatggggagtaggatataaatgggaagaataaaaagaaaagcacaggttccattaagtttattctacctcaaatacttcgcatacatttttgtctttatgtgcttgctggcaactttattgctgatactgtttaatgtccttatgaatgataggattgtctatccagcggattatgcacagaaacaggcgcagagtgcgtataatgaaattcaaacggcagaacaagtcacagaagatatgatcccggagctgtgcgattatgcagtctttgattcagacgggaatttgaaaagcggaaatttaacgggaaatgctgcacaaaaggcatgggatgctgtacaggaagaaaagacaaaaatcgggaaatacaactatacgatcattccgagaaatacggaatattgcgttttaagatatacgatctctccacagtacaaatctccccttttacagaaaatcctcttatccccccaaatgctcatttttatatctgcaattcttgggatgctttttatcatcattatgattgcggttcgtttcggaaaagcattgaataaaagattgtccacactcacttttgttacaaacaaagtcgaacatcaggaattggattttgaaatttctgcgagtgggattaaagaagtcgatgcaatacttcattcaatggacaatatgcggacggcactaaaagattctttagaacgacagtggcagatcgagcaggaaaaaagccgtcaaatgtccgctctggcacatgatttgaaaaccccgctgactcttgttcgtggaaatgcggaacttcttctggaatctgacctttcagaaacgcaaaagaaatacacagaatacattgaaagcagctctctgcaaatgcagaattatgtgcagacactcattgaagttacaaaatcgtggcaaggctatcaatttcgaccccaaaaaattgcctgtgaaattcttttccaagaaattgagcagcagttaagaggattatgtacggttcataatttgacgccggtatgggattgccgctacacaaccagcgaaatttcagtagatcacgatctcctaattagagcgattgtcaatatcgtatccaatgccgcagaacgcaccccacccggaggacaagttgcgctttcggtgtccgaagaaagccgcattttcatggttacaataactgatacaggaagtggattttcaccagaagcattaaagcatggtacagaacagttctacatggatgataccagcaggacttccaagacacactttggaattgggctatatgccgctgattcaattatccagaaacacggcggccaacttattttagacaattcaaaagaaacaggcggagcaaaaattacaatcaaaattccctcgtaagctaaaatgggcggtatggaaataccgtccattttattttggaatctttatcaaatcttcagaaacagaacttaatatagaataaaagaattgctctgccgcacgacggcaaaagaaaaaaagccgtcgtacagcagccatattgatgcgcctatttgatctggcggcggctttagaaaacagagccgccgtttctttttgtctaaaatacaacgacgacaccacaccttgcaatctggcacggcggcaacaggaggatgccgccatgcacgacaatgactttcgacataaaacgacaagtacgaacttatcaaaaaaagcctgttcccggcagggagcagtttcggccacgagtatgaattatattgtgtagaaaaacttcataatgcttcttgtcatgcccggctggtctgcatccagccgggcattttttgtcgttttctgtcggctgcaccggctataaatttttttgaaaaaggaggcgttcagcgggcagtaagcggaaatccgttcgctttgttggcggaaagggagagaaccaccaatccccccacggaaaaggggtgagaagatggaagctatcccccgtgactatggcgaacgatgccagtttgaccgctattgcaagctggtactgtaccatgaggcccttgactacctgcgggaaatgcagcgccgccgcgaccgtgaaatgtcgttcagcgccttgtcgcaggcagagatggacaagctctttacggtagatcactatcccagcgacagctatgttttttcgtcgcatggttatgacctgctgatcgacaacgagcttgtggccgacgcctttgccggtctgtcgaagccggagcaaagtatcttgatactgcgctgtgtgctggacatgaccgatcaggagattgccgaccttatgggaatgagccgcagcgccgtccagcggcgcagggtgaaaacgctgaaagagctacgagaaaaattgatggcgttgatgccgaaaggaggttgacgcggatatgaagcagcccagttacaaaggcagggagcttttgcccctttcggtgattgaagcagcccgcgctggcgacgccgaagccgtggagcgtgttttgcggtactacgagggctacataaacaagctgtgtaccaggacgctctacgacgagatcggccagccccatgtttgcgtggacgagtttatgaaacgccgtctggaaatcaagctcattcattccatcgtcgttatgatctaacgacccggcccccggccagtgaagcgccttaccctttccacgttttgctgttccccggaggccgcaggctgcaccttgtcaaagaaagcgcaggaagataacgcccgcgcagcatagggcagaacggacacgttctgtctgcattgagccgggcggctggtgcgccatgacctccatattggagagagcgacccacaccacaccgtaatgcaagcgtggcggcttgcgggcgacgacgtgcaggcaggataatgatactcccttgtcgtcgtagtccgagcgttcaaagcgtcacaggcaacgagcagggccgcgtgagaaccacgcgggggtgagattcccgtggagctggccgtagccgtccgttttagcccattttcgttttacaccgatgtaagcgaaagggggattttcccgtatgaatacggatttgcaaaagaacaccaacgcccccgttgtacgccagtacgagatcgggggcgttcgctatattgtgagagccaccgtaaaagagggggcttctgaaactgcggtacgcaaaataagtcgtctgatacagcacgatttggacaagcgaaccgtcgaaaattaagacttttttcatatcctaaaagctgacgggcggggcctgatatggtataatcatactgtatcaaagccccgttttccggctgcggaataggaggccataatgagcaaacagccggatatggtgactgcactttattaccgtgcagcacggagaaatgatacaaacctgaaccttgacaatcaaatgtaccaactgctgaactatgcagaacagcatgggattgacagcttcgtgctttacgccgataaaggcgtgtcggggctggcccttgaccgcttcgcgcttacttccttatgggcgcaaatccatgagcgccgcattaagcaggtgatcgttaccagcgttgaccgcatcagccggaatgcctgtgaaagcctgcgcttcatcgacgatgccgccaaacacggcgcagcggtgatctctattcaggagggcggcgaaccgctggcggaaagtgaaatcttttctgcaatccgttctttggtgaaaggcggtgagcaggcatgaagaatcctaacatttctcctgtcagctcattccagcgcatcaccagcaacgccccgttgagtgaggcagcgcggacagccattcaaaatactgtgctgcaattctatgttcgcaaccagccacaggaggacgacagcgagggcattaccgcctgctatgaacgcctttcccaagaggacaaattggacggcgaaagcaacagcatcatcaaccagaaaaagattttggaaaagtattgccgcgaccacggttatacggccatccggcactatgacgaggacgacgggtattctggaaccaacttcaatcgccctggcttccagcgattgcttgccgatattaaagcgggtaaaatcaagcgtgttatcgtcaaagatatgtcccggtttggccgaaattatctgcaagtggggatgtacacggaaatgctctttccagagtatggcgttcattttatcgccgtgaacgacggtgtggacagcatacgcggcgacagtgagtttaccgcaatccgcaacgtgttcaatgagatgtacgccaaggacaccagcaagaagatcaaggccacatggcagtccaagggacgttctggcgaacaccttaccaccatcccaccttatgggtacgtcaaagacccggaggataaaaagaagtggcttgtggatgaggaagccgccgccattgtgcagaaaatatttgcgctgtgcgtggatggattagggccgacacaaattgccaaatggctgcgtcagagcaaagttctcaatccaactgcctacgcccaccagaaaggtttgccagtttccaataagcctacggcagacccctataagtggacgaacgaaacggtttcccgcatattagagcgcatcgagtatttaggccacaccgttaatttcaagacctccaagccgtcgtttaaaaacaagaaaaaagtgtggaacgacccgtccgagtgggtaatctttgagaatacccaagagccaatcattgaggaaagcgtgttcctgatcgtgcaaaatatccggcagggccgccgccgtcctaccaagatgggggaaatgggaatgttctccggcctgctgtactgttcggattgcggcggcaaaatgtatctgtgccgagccaatcactttaagcccgaacaggaatattacatctgttccacctatcggaaagaccgcactttatgcacaactcattctatccggcgtgtcattctggaacaaatcgttttgcagaatttgcgggaagcaatccagtatgtgatgaaatacgaggacgactttgtgcagcgggcggcagatcacagcctgcgggaacgggataaggaactggcgcagaaaaaggatgtgctggcgaaatcggaaaagcggattgcggagctggatgttatctttaagcgactgtatgaggataacattatcggcaagctgtccgacgaccgtttcatcaaactatcccacgactacgagcaggaacagcaacagcttaaagaggttgtggaacggttgcggcaggatgtgaaacagcaggaaaagcaaaggctgaacgtcaatagctttatctccattgtcaagaagtacacggatatgcagatgcttgacgccgccgtactccgcgagtttgtggagaagatttatatttctcatgtctacacccccgacgaaaatgaaccacgggtaaaggtgcgggacatccagattgtctacaacttcattggtgcatttgattttgaggaagcaagggagcaatcccaggcagcccaaaaaataaagaagatcggcgtagcctaaactacgccgacctctcacatgaatgttttcttacgtcaccgccccttcaggagcggttttattattgttcctatgctgacgaggatgaaaatgaatttgaaactggagcaatggcaaatgaaaacttatcaaatgctaggaatgcctatcgtataatgaaaggacttcttacctcggatgagattgttgaaatccgcaaaatggatctatttgtatagcggtgaaaatacctgtagaggtaagatggcagaagctgtttttcaacagtctgccacaggagtctcctttttatgagcatggattctgataggaaaggatatcctctaaattaatgctgcggggacgatccatatgctgcatgattacctgatagatatctcttatattgccacttttcatattttcatagatatcccagtgctcacgataagtttcttccatgcgtccttcatgggcgagagaaagggttgccaatcttttaatctgatataagtagctgctgaataattggttgaaagtgctgttctctaaataggcaacaatttcaatgtgaaatatattatcatattcaacgaatttatgaatatcctttgtcgtgtctagaatttctttttgcttctctaatagatattccagattgtcaaaaagcttttttggaactttcttatctctggcaattgcattggttatttgcattatacagtatccctccaatgcagaacgcacctggaatgtctctataatatccttttccgtcagttgatggatacaaaatcccttactaggtattatatcaataaaaccttcctgggcaagccgttgtatggcatcgcgcatgggtgtgcgtgaaatccctatatccttggagacctttgtttcagaataaattctagtatattcaaattcatcatttatgatcatatttttcaaatgctcataagctttttgctgaagaggttttggcatatcagtatttcccttccgattttcttattgtatatattaacccatttaaaagaagcagtcaaattgaaataggcttctgtgaatatttgataaatttaccagaagtattttatatacattcacgaaatcaatattccttattgacaacaaaccggtataccggtatactggctttaaaagaagcccaatatgaaaatgcgaaagtgaggaaaaggataatgaaggtaggatttatcggtttaggaattatgggaagaccaatggcaaaaaacttattaaaagctggtgaggatttatttgtctatgatctcaatgaagcagctgtaaaagaactggaggaggcaggagcagtaggcgcagatttgaaaaccatcggacagaattgcggtgttattttcaccattttgccaaacgggtccattgtacagcaggttctatttggagaagaggcagtatcccagtacattgaaggggggacagtcgtatgtgacatgagttcagttacccctggagagtcaaaattttgctatgagatgctgaagaaaaaaggcgtaggttttgtagatgctccagtcagcggaggagaaccgaaagcaattgatgggactttggcatttatggctggcggagacaaagaagagtttgaaaagctgataccatactttgaaattatgggagcatccgcattattgattggaggaagcggcagcggcagcgttaccaaattggcgaatcagattattgtaaaccttaatattgcagccgtgtctgaggcttttgtattagcagccaaagcaggtgcggatccggccaaagtatacgaagcaatccgcgggggactggcaggcagtgtgatcttagatgctaagatacctatggtattggcacggaattttaagccaggtggaaaaatttccattaaccataaggatattaaaaacgtgctgtccacagcccacgacatagatgtacctcttcccatgacagcacagttatttgagattatgcaggctttgaaagtggatggacatatgaacgatgaccattgcggaattattcaatactttgaaaaactggcagatgttaccgtaaagagtccgcagtaggtgtaggaggggggattttatggatgttacaattacaacatggggagctcttctgggcttagctgtggccattattttaatcatcaaaaaagtggaaccagcttatagtatgattgcaggtgcattaattggcggtctggcgggcggtgccggaatcacaggaaccgtagatagtatgattgtgggtgcacaaggaattatgccggcgatcattcgaattgtcacatcgggagtcctggctggggtattgattcaatcaggagcagctattcgaattgcagatgagatcatcagattatttggtgggaagagagcacttttttctttggcactggccactatgattcttactgcagtgggagtttttggtgatgtggctgttattacagtagctcctattgctatggtgatcggtcagaaattagggtattccaattacatattgttagcagctttgatggggggcgagaaagccggaatggtcatatcgccaaatccgcagacaattgccatatcagaggaatttggagtagagctttccaggctcatgatcgccaatattgtccctgctatggcggggctggccggaactgttgtactgtgtaccatattaagcaggcgggcaggagaaagaagcagttcttcgtcaatggataacggtccaatagactcttcgccattaaatcttcctgctgtgtggagcgcggtggctgggccggttgtcgtagtgctgctgctggcgctgcgtccaatctgcggaattaccattgatcccttgatcgcacttcctgccggaggtattgtaggggtgctttgtatgaagaagggcagatatttatcacaatatataacctatgggctggggaagatgatgcctgtggccatactgcttatagggacgggcacaatatcgggaattattaaaacatcccagttccaacaagacataacagcgatgatcaatgctgcgaatctgccggcatttttgctggcgccaatttcaggtattttgatggcaggggcaacagcatctgcatcggcaggtgccaccatagctgcatctacttttggcaggtatatacttgcagtggtatcagcggcggccggtggcgcaatgcttcatgcaggatgcatcgtattggattccctgcctcatggttcgatttttcatgcttcggcaggggcgatgggaatgcctgttaaacagcggttgaaattacttccaatagagattttggaaggactgatcattgtaattacatcaacatttatttatggtatcctataaattaaaaggggaagagaatatgagaaaagttgaaaaaatgaatgcagataggatatatgcatatccgcaggtagatgaggaaaaaattgaagctatgcttcaagaagaactgaataaaaaccagatgaaaatcgtagtacttgacgatgatcccacaggagtgcagacggttcacgatatttccgtatttacggactggaccaaagaaagtattcgtcaggggtttatggaagaaaataaactattttatatccttacaaattcccgtggatttacaactgaggaaacaatcaaagctcatgaggaaattgcacaaaacataatccaggtggcttctgaattaaacagggagtatcttgtgatcagcagaagtgattctaccttgcggggtcattatccgttggagacacagcttttaaaggaagagattgaaagagcggaaaatagtacaatagatggtgagattatttgtccattttttaaagagggcggacgcttcaccatagataatgtgcattatgtaaaatacggggatgaactgattcccgcaggtgatacagaatttgctaaagataaaacctttggttatcagtcttcagatttgtgcgaatatgtggaggaaaaaacagaaggtatttataaatcaaaggatgtaacctgtatttctctggatgatctgaggcaggtcaatattcataagatcacagaacagctcatgggagtcagtgattttaataaagttattgtcaatgcagttgactatgttgacataaaggtgttttgcgttgccttataccgggctatagcagccggtaaaaaatttatgtttcgcactgcagcagctctggttaaggaaattggaggaatcaccagtcagccctgtttgaaaagggcgcagatgattgttaacgagaccactaacggaggagttattattgtgggctctcatacacagaaaactacttgccaattagaagaattgaaaaatgtggacggtattgtcagcatagaatttaattcggatttagtattagacgaagaggcgtttcgtgaagaaatacagaagacaattctaaaaatggaaaatgttattcggaggggaaagacggtagtcgtgtatacaaaaagaaagcttttagaggtaccggatgatacaaaggagggtgcacttatccgatcagtaaaaatatccgatgccgtgcagtcactggtggggaatttgaatataacccccagctttattattgctaaaggcggtataacttctagtgacgtgggaacaaaagctttgaaggtgaaaagggccaatgtattaggtcagatatgtccggggattccagtgtggcagacgggatgtgaaagtaaatttccacagacgccctatgctatttttccgggaaatgtaggagaggtgggaaccctgcgagaggcagcggagatttttatgggagagtgattctatctgcttttagcctgcatatgcgaaataggtatataagccctgtctataggaataaaaaccatccgggggatgcccacggtaaggtataagccatacgaaagaaagcgagtcttggataagtacataagcgtggcggagccccggatggtaaacaatctggctgcccggtgacggggaaaggccaggaagtgattgaagtggagcattctatgatcttattattccagttcaaatgctccagtataaagtctgtaatagacaccatgtttatgaataagttggttatgggtcccctgctctataatatggccggaatctaacacgagaatggtatctgaattgcggactgtagaaagtctatgagcgattacaaatgtggttctgccctccatgagattatccattccctgttgtacaaaagcttctgttcttgtatcgatcgaagaagttgcttcgtctaagatcataactggcggatctgccactgcggcacgagcgatggataacaattgtctttgtccctgtgacaggctggcaccattttgtgtgagctttgtttgatagccctgtggtaaatgacgaataaattcatctgcatttgacagttttgatgcttcaatacattcttcatccgtagcgtccagacgtccataacggatattatccataattgttcctgtaaataaagttacatcctgcaatacaatacctaaagaatgacgtagatcttgctttttaattttgttaatattgataccgtcataacggatttttccgtcagccagatcataaaagcggttgatgaggtttgtaattgtagtttttcctgcacctgttgctcctacaaatgcaattttttgtccggatgttgcgtttaacagaatgtgatgtaaaacaagtttttctttcgtatagccaaaatctacatcgcaaaattcaatctctccttgtaatggcgtataggtgagcgttccgtcatgatgggggtgtttccatgcccatatccctgttttatcattggtttcttccacaactgtatttttgtagtttattcgagtgagagttacgtatccgtgatcttcttcgggtttttcgtcaatcaaatcaaaaatacgttctgctcctgcaaatgccatagccattaaactgatttgctgggaaatttgtgagataggcatgcagaaagttttagacagattgaggaaggcgatgatcatgcccactgttacagagctgctccccttgatcgccatatatccgccgatgagggcaatcagaacgtattgaagattacccagctgcatgatcgttggcattaagatatttccgtatttatttgctaaggctgcatcctcacataatttcttatttttcttatcaaagctttgttttgctttatcttcatggcagaataccttgatcactttctgaccgttgatcatttcttcaatataccctgtaaccatgcctaatgcttcttgctgtttgataaaatattttgcacttgccccaccgatctttttcattgcaaataccataaggactgtaactgctccaactaatagagtcaggggtacactactgatcagcatggagatcaatatggcaattacagtaacaactgcggaaacgaattgtggtaaagcttgtgaaataaattgccttaatgtatctgtgtcattggtataatggctcataatatctccatgtgtatgggtatcaaaataactaattggaagtttctgcatgtgtgagaacatatcatctcgaatgtcttttaaagttccctgtgatatttttaccataaggcgattataagcaaaggttgcggccactcctaaaatatagatcactgccataagaaaaattgtatgtaagagaccagaaaaaacaggggtatcttctaacaaaagaggttcaatataatcatcgatcaatacctctaggaaaagtgaactggcaacaacggcacaggagcttatcaaaatacaaaatattacaattccaaacataaatttatgccttaaaataatataagacaacagtcgtggaactgcttttgaaatgttcgtttttatctttttcattctgcgtcctctcctttcgtttgagattgataaatctcctggtaaatttcattgtttttcatcaaatcttcgtgtgtgccataaccattgatttttcccttatctaaaacaagaatgtaatctgcgtcttgtacagaagaaattcgctgtgcaataataatctttgtagtctggggaagttcttcacgaaaggcttttcgtatcattgcgtctgtttttgtatccactgcacttgtggagtcgtctaaaattaatattttaggttgttttaataatgctctggcaatacaaagacgttgtttctgcccaccagagacatttgtaccaccttgttcaatataggtatcatacttatctgggaaggtatcaatgaatgaatgagcctgtgccagcttacaggcatgaataagttcctcatcggctgcatcttcatttccccaccggagattttctttaattgtgccggagaaaagttcgtttttctgtaaaaccattgccacattgtttctgagggtgaataaatcataatcttttacattggtaccactgatgaacaggcttccctctgttacatcatagagacgggggattaactggacaagagaggtttttccacttccggtagaacctattattcccagcgtggagccagaagaaatacgtagggtaatattggacaggcattttttttcggtatcattaaaataactgaaccccacattgtcaaatacaatttctccattgggcatatcgtaaacaggagcattgctattttctaatgaaatttcttcatctaagatctcaacaattctttcacaagaagctcttgccatattgatcattacaagtacctgagataacatcataaggcagtttaaaatattcattgcataggcaataaggctggacaattcgccggttgtcattgtagttccctgtgtaagaactattatttttgctccaaaccagcataaaaataaaagacagccataaactgcaaactgcattaagggcatattataggcaacgattccctctgctgtggtaaaggtatcgtaaatccgttttgatacacggctgaattttttgatttcaaaattttcacggacaaaagattttacgacccttataccggcgagattttcttgtacaacactatttagttcatcatagatatgaaatactttttcaaaatagggatgtgagcggctgacaataaaataaagacctattcccaaaacaggaattgccacaagaaaaataatagacaaccgtgtatttatcataaatgaagcgatcagcgaaaaaacaagcatgattggggcacgcaccgccacacggatgatcatcatataagcattttgtacatttgtaacgtccgtggttaaccgggtaacaatacttgatgtggaaaatttatcaatatttgcaaaagagtaatcttgaattttgtaatacatatcctgccttaaattttgtgcaaatccggcagaagctgaagcacaaaagcttccagacagcattccgcagacaatacccagaagtacacagataatcaggacgatcccccattttccaagcagttcgccattgtgctggctgatccctttgtcaatcacaacggccatgatcattggtatcagaatctcaagtaatacctcaaatacaacaaagaccggtgttaaaattgatgtttttttgtattcccgaatggaacgggccagttttttgatcatttttttcattcctttccgttagcaagcttatcctctaactgcatgaattgtagcattacaattggaaaatgagaattcaatataaattaatgtcgttaaataaaagttaatgttgaaagaatgttgaaaggattctataataattggaaaggaggggatctctatgaatacacaacagttagagtgctttgtgcgggttgcagagaaactgaattttacaaaagctgctgagacattatacatttcaacacctgctgtcacacaccatataaaaaatttggaagaagaattgaatacaacactttttatccggacatccaaaatggtaaagctcacagaaacgggagccttgttttatagcgaagcaaaagatattcttcagaaaatggctatggccgaaaaaaaggtgaaaaaactggcaagtcaaaaacttgcggtacttcgaatcggctgctccagccaaacagagcttgataatctggaaaaacctttgaaaaggttaaaagaacttcttccagatgtatttcctcagatcattattcaagattatttcatgctaaaatccttgtttgacaacaaacaactagatgttttgattggtaccaaggaaatggcagcggaaacttatgattatatttttaagagagtaaagacagttgaaagctacgcgatcgtttctgatcgttcaatacttgcacatgaaaaaaatatcagttttaaaaaaatgtatgaacttcctttgattgcgttacacccacgtttgatcccctttcagtacggaaataagttacaggagtttattacactccatggtcagaaacattttcaatttttatgcgaaagcgaccagtcggcaatccttttggcaaaatgcaattatggagtagctgtattgccggaaatttatattccggcccataaagagggaatcgttgtcttaccatttgcagaggaactcaaacccattgaatatggcatagcttaccataagaatttaaaagaaaagcatataaaacagttcataagtcttttctcagaaagcgaaaaaatatagagggaggtcggaccaatcttacccggaggactatgatttttcatattcttcgatactgtgaagcagggcaaggcaggccatcagtcagatggaaaggaaataccagaaggacctggtcattgaagaggaataaaagaataccagaaactgtaaaaagtatcacttcccaggaggtggtactttttaaatgccagcaggcaggcctcgccccaaaaaaactgcacatttatttgacaatatcctataataccaaaaaatattacacaaatacaacagatttcgtgtggcgtacaaatggacagataagataaactttggataacaaataaaggaggcagagccatgaagaaagcaaaatgtttcagcgaccagcattataagatcggacctattaacgacaagccaccgatggagagcaggctctgaagctgtatcagaggcataagccggagctgcttatttctgatgtgtgcatgcctggcatgagcggtctggatctggcaagtgtcatccgggaaaatgataaaaagtcccacattctgttcttgtccggatataagaatttttcttatgtaaaacaggccatacgtctggggatcgatgactatcttttgaaaagtgacctgacggaggagatgctgttaagtaagcttcttaagctcaaggaggagatcgagaaggaaaagtccattcaccagtataccacaggcatcatcatggaggaattattccggaaaaatgtaccggagcaaaggtatagggagcttttggatgagaatgaatatatccgtatacataagaaatattattatgtgatcttgtcccagaagacctgccccagctttttgcgggactatttaaaggacaagcaggagacagattctgtgtgcgaatatgaattccggcggatatgtacagagagcgcctgcaaggagctgtccctggtggtggcctttcccatcggagagcgggagtgcctgggaatcctggaatttcaggaaaatcctgtatcagagcgggagatatcagccaagctctatgaattcagcctgaaggtctatcacgggatgaatgtgggagataaaaagtacaatgtgttctattatcccaaaggctgctctgtgagaaaattcagcagcctttaccgggagaagaagaggcagttttctgaaacctatgtaaaagcccgtcccataatctctgagtttggcggggatggtaaagagggccgggaggcggagcagcaggatggagtgctctctgtatcctcggaagaaatttaccagaagatgaagcagcaaaattttcaggaggttgagcagtattttcaaacgctgcagatctccattgaagaggaggaccctatcacctatctgtggtatgtgaaaagctttgtggaggccatgtccagatttgaaggaacggtgttcggggagctgaatggactgagctttaatttggcagagtccagcggtctgtttgaactgagtaatcccagggagatggtaaagtatcttcggtacaagctggaagaaattcagaaatttaccagccaggacggaaaaggaagctattccccggttattgaaaaagcggtggcctacattaaagaggcatatgccatggatgagctttcctccaatctggtggcaaaggctgtgaatttaagtccctcctggctgtccaccaagtttaaggaggaggtgggtgtgggggtgagcgactatatcaacagcctgcgggtgcagaaggcaaaagatttcctggatcacagcgatgacatggtctacgaggttgcggaaaaggtaggatttacttcaagtcagtacttcagtaagatttttaaacagtttactggacttacccccaatgagtataaacgggtgagtaaaaagaaatagggaagaagacaggagcaacgtgcatgaagctgagaaataagcttttattatcccagatcgtggtatttttatttgtatttatgattctgaccattgcccttcccaatattgtgtattggtcagcaaagcaggcagatatggaaaattccatgaactttaatgaacagatcatgatgcgcattgacagaagctttgaggagcttcagcgtttttccaaggtggtggccggggatcaggagctcaatagcctgctgaaggagtacatggaccagccaagcgggaaaacagaggctaaaatcagactatatttgtcgaatatggggaacacggatggggtcgctccttatcagaccctgggaatttatattcatgtacaggacagccggggggattttgattttcacacagtgggtatggtagaaagtgtcaaaaagcatattgtaaaccaggtgctgccccgctatgaagaaaagggccgcaggaagatgttcctgtcgcctttttcctttatcccgggagagaccacggcggtgtttggaagcacctttaccatggggtatggatatacttgtccttacagcaagaatggggtgtcgggcagtgttaccctgatctcctcctttgatgaaattacttttatcgtgaaggacgtgaaggagtacagcaaggactttgtgctgctcactgaggataacaaggcggtaaagcccagtgtgggggactctcagatcaaggtggaggagaccttgaaaaatatgaagtacggggacagctatttcgagggctattacttcgatgagggcggggtgtgcacggtgaggatctcagaatatggtaactggaagctgatcacccggcttaccaaggaggatatcattgccaataaccggtctgtgatctggtttgacgagcttttgatcggtatcttcggcattgggatcatgctgatcatgatcccctttgtgcgccggttcaccaaacccctgggagaggtggctgagcagatgggagagatttccaatggcaatctggatgcccgggtgacggtgaaatcccaggacgagatcggcgaggtttgcaaagcctttaataccatggcggtgaagctggatgataacatcaaggagcttcttgagaaggaaaagacggagcagactctgcggtacagccttttgatctctcagatggatccccattttatttataataccatgaataccatcacctatctggctcaaaaggggaggaacgaagatgtgatccaggtaaaccgggccatgatcgagatactcagggaccggctgcggattgaaatttctgagatctatgattctgttcatcaggaagtgagcgtggtggagcaatatttgatcatacagaggcaccggtatgaggggacctttaaggccaatttcctcattcaggaggagacaaaggattgtctgatggcgaagaatattcttcagccattggtggaaaatgctctttttcatgggatttttaccaaccgggatgaaaacggagagctgctggggggctgtatcaccatccgcacagagaggcagggagatttcctgatggttgcggtatgtgacaatgggtcaggtatgtctgaggagcaggtggagcgtttgagcaaccagccaaaggcgaagatccggggggcccacattggactgcgcaacatccgggaacggatcaagtatatttacggagaagcctacaacattgagattcagtcaaagctgggcgaagggacctgcgttgccttgaagcttcctgtaattgaggaaatccaggaggagaggtagaaagagatacgaacgctcctttggtgtcggttattatcagggctaatttaaaattgaactactttgtgtggcatagttttgctggtgtcactggcatcgctgccggcggcaagggttaggaacagctccataagggggctgagccatttgtttttgtgccaggcacatgcccctgtgatggtgcggcctgtaagttctgtgtggatggtgcacagctctcctgattctaattcctccttcacggaaaaggcagggaggtaggacacgcccacgtcacttttgaccaggttcttgatggtggggatgctctgcagctcaatggtgtggtccaaggtgatatcccgctgttttaagtatgtctcgaagatctgccggaaaatacagttgggttcattgatgatcaaggggagggaaaggcgctgctttggcgtcacgaagtcaggaaaggcctttcttaccttgggggaggccacaagtgtcagtgggtattcccctatgggcttggtacacagacccatcagtccccctacgtcttggtataaaacacccagatcaatgctgccgtccaggagagcgtcccggatgtcatagcaattcatggagcggaggtaaaggcgggcattgggggcaagctcatgaaaacgctttaagatgggcggcatttggtaacacagcagagtttcgcctacggctatgcgcaggtccccgcgcaggtccgaaagagacgcgtcgaaggaattgagcttatccattgcgtgtaggacctcatctacataggggatgaattgttcccctgcattggtgagcaccatttttcgtccaatccgctcaaaaagctggacagaaagctcctgttccagctgctgcatctggaaggtgatggtggactgggtgtagttcagtgctttggcggctttggagaatccgccctgtgtcacgatcgctttaaaagtgattaaatattttaaatccatgactccaccttattcttcgataaaatcgaattattagttttgatatttcaattatacaaaactttatcgtaagcttataataagacaaaaaggaggggatgtcaattgcttggacaggttttgatctcttttctgccttacgcgctggtgacgggatttacgccggggcccaataatattcttgcgctggataccgtgagccgtaatggctggaggaaaggcaggcccatgcttctgggaattgccggaggatttctctgtgtgatggttttgtgtgcagtggtgtgctttgaactggtcaggcttctgcccgttttaacggggattttaaaatatgtgggagcggcttacttggtctggctgggagtccacattgtagtggataaatccggcagttcagtccagaacaagggaagttccttctggactggattctttctgcagtttgccaatgtaaaaattattctgtacgccctcacagtctatagcggctatgtgcttcctgtttcccagtctctttggtttttgctggcagcagctgttgccaataccgtggcaggacttgcggggacgctgacctgggctattgcagggggtgttttacagaaatttattaatcggtaccggaagggattcaatttggctatggcagctgtgttagtttggtgcgctattacactttttatttaaggagggattttgtatggagaaatatttgaagatgcttacagaaggcggggcggatctggcggttgagataaagccggagaaggtggtgaccgctccatggacaatttataaatgtaaatttggctgctctacgtatgggaagagctattgctgtccgccaaatacaccaagctaccaggaaacacgggcaatcctggactgctaccaaaaggggattttattccgcacacatacctcgcttacgattacccctctggcggcggagctggccagagagctatttctggacgggtactataaagccattgcctttggggacggagactgtcagcgatgtaaaacatgcagcacggatcattgcaattttccagggaagaccgttccatctatggaggcctgcggaattgatgtctttgccactgtccgcagccagggcctggaaatccatacccttcgtgagcgtggggaggaacagaaccattttgggctgattttggtggaataacagaaaaataaaaatgcagaaaaagttttacgttccaatgggcgaaatcctttttcagttggttgatttgccagaaggtgaagagctgtttgagggagttggttatggggatgaagcctaagcatggcaaagcgcttttaggatagcaagcgggaatcctcggttattcaattgccgagatgaaagcgtcaaaatgtgcatttctgcacgaaacaatagtggctgtatccagcctataaaaaaagaacagatattcgacaatatattgctttgcttattgaaatagtgtatactatatgcatgaaagaaaatctgatacatgcaagaacctgtgtatataatatcaactaccatgtggtgtggccggtaaagtaccgcaggaagatcatcacagaagacatggagcagacgatgaaaaaatgggctgtggagaccgctgatgagaagggcttcacagtccatttatttgaagctggagaaagagaccatatccattgttttgtttctgcaccacctaagatctcgatctcatatattgtaaagatgctgaagggtattattggaagatatactctccaaaaatatccggaactccgtaaatatttatggaagggagaattgtgggatcattcctattatgtggaaacaataggaaacgtttcggaggaaaacatccgcagatatattgaaaaacaaacgaagtcttactgacaggaaaggggaatgcatatgctcttgtcgagaagagaagtatttttaccaacagaagaacagaagatcattttgggacatatgggatatgcagcatttaaactctggaatgtggcaaattatgaaaaaaggaattacaaagagattggaatgaccagatatccggactggtatgatcagaagaaacggttaaaagaaaatttcttttataaaaatcttccatcacagacggcacaggatgtgctccaacaattggaagaggcgtggaaaagcttttttgtattgctgaggagcagaggggtggagaatccgagaccgccgcgtttccgaaaagagaagatggatattacttttttgaaagatgcaatccggcaggaagaaggaaagatccggctgaccataccaaaacagttaaaaacttatctgaagagccagggtgtggatgctgattatctttatctgaaaacaaagcggttttcagacattcatatcaaagagattcagatcaagtttgatgaaaaaagatatacagcaatagcagtatatgaagagacagatgttccgatgcaggaagataatggacattatctggggatcgacatgggactgaaaaatatgctggcctgctatgacagtgcagggaagacatttctgttaaacggattattgaatactacccattattttgataaagagattgccagatatcaggggatcagtgaccgtcagcagtcatgctgtgggatcaagtacccgaaaaaaacgaaaaaggtacgttccctatatcgaaagaagaaaaataaagttactgatcttattcataaaacaaccagatatgtggctgagtattgtcaggcagagcatatcacaacggttgtaattggagatatgaaggggatacgtaagggaaaggatcttggaaggatcaatcagcagcttcattcctttccgtatgaaaagatcctccagaaactggagtataagctgaaacggtacgggataaggatgatccgtcagaaagaaaattacagcagtcagtgcagtccgaaaagtgataaagtgggaaaagcgtttgcacaaagccagaatcgaaaatatcggggattatatatagatgagccggatatctataatgcagactgcgtgggggcatataatatcctgcgtctgtatctgcaaaaaaataaacttccgtttccggaagcggccggactgaactgtccgcagaaagtatttgtgtaagtccgaaaggactagcaatattgggcgcatggactgcccgttatggtagcaccgaaggtgcggcatatagatgctcggtaattcaagtgccgagtagttcacaagttggtaggtatacaagtggggaaatatgtaattggaatctctgaatatgttcttgaatctgatgaagaattgtttcagcagctcttaaatttgtattaaaggctatccaagatactataaatggattttaaggaaggtcaatagcatatcggcaataataaaaactttttgccgatatgctaaaaaaggtaaaatttgcatcattaatttgacagtaattggaaagagagttttggaactggttggaggctggataggatttacggcatgaatctttggaagggctgtatatgtatgaataattagaaatgagatgagtcagggtggaatttttgctgcttaggttaaatcgcttatgggcgataaaatcttttatactagcatggtatcatatttgaaatagggattcaagggaaaagtttagggaaggaagtgactcctacgtgtcatttccttcccttccctgtgttggacgagctatattccgccagcacctctttttgcagaggttaaaccctatggatcagctgggttcatctgtgaagtgtattttttgttcactgtcaatagatagatattggaaagtgggatggctgtcactgttgggggtgtgatagctcaccatatcttttccgtccttattctggaagatcatacagtgtccaccatcgctgggagtatcaatctgttccgtagtacaggtccaggttcctgttaaagtcccgtcatcagactgggcgtaacccatacggtatccatcttcagacatggtggaaaagaagcagatcaactggccgtcatccgttgtgtagaagcatggtccgtcattaaggaccattcctccaaaggcttcagttgcccagccacatccgcttacatcaaagagtttgaagggctcatcggcatattgatccagactttcattgagtttaactgcataaaacccttcttttccgtgggagtaaaccatgtatgtttcatcattttcttcatataaggttgcgtctatggcatccacatcttcaggagtcagagtggtatctcccacaggggtaaaggggccaaggggatcctcagatttgaaaagctggattcctttgttctcacggctggaaccgcccatggagccatacagatagaattcaccatcaatttcatatacttctggagcccagtattgggagtcggcccaaaagcttccgtcattttcatagatagtataagggccttcccaggtttccaaattatcgcttacatatacgtgaaagctgtccatttctccgccaaaggcatcttccccatctgttccatatagatagtagtggtcattataattgagaacatacggatctcgaatgagaatttcatcatttgtgagagtttgaacctgagggttttccacggcagaaacaatctgcgttccggacatgtctgcacatagcagcatggatgctataagcatatggctgattatctttcttgtttttttcatgttttgtaaaacctccctgtattatttgataaactcagcataacagaggatcaaataaaaggacatgatttttcagggatagaaagggtgttttcttgatttttctatgttgaaattgctttcataggatggtgggagtatagttgttttatagttgaaagtttgtgatccactgactgagcgggacaaggatatttgcagagggagaaggatggagaaaggaattgagaaatcagtgaatggatattgtacaattggggatttggtaagaacatctttgaagcagtaccaaatgaagggacgaaaatcatcgttcaaggaaattgcagcagcaagtttttcggtagatcataaggttggacaggagcagcgtgatcccgttgaatttatggaaatagaggagttttgggattttttaaatgggataccggcggtgcctgtctcccaggaaaggagtagtgtctcaagaaaacgagagcttccggattttgtagggaatttttacatccaggagtctgagatgtttaaggatatggaagatattacaatgtatatccatattccttatgtaaatgacggcctgcacagtcacgatcattttgagattaactatgtttatcatgggacaggcttttttgaatttgagcaggagaaaaaggagctgaaggagggaacattatggctgttggcgccagattctcctcacaatgttatggcggaagaggatacaatcatactcactattatggtgagacggaccacctttgaccgggcattctttccgttgctgaaacgggatgattctttgacttcttttttcaaaaacgcaatttacgagttggaatatccgaattatttgttgtatgaaacagagaattcattggagcttcgcaggtatttccagagcttgtttgtggagtatgtgagaaatgatagctactgtaatggaaatgttatttgtattttgtctttgatcttttcagtagtgctgcggaataatcagaagcctacggtgttttttgatttttctaataagaaatcaaataggattaatttcccggttttaatgcagtatattcagcagaattatcggtcagtgacccttaagaatctttcagatgaatttcattacagcgaatcctttttcagccggttgatccgacagaagctggggacaagcttttcggagttggttatggagctgaagcttatgcatggtaaagagcttctagaagacgggcgatatacaataggggaaatatgtgatcgaattgggtatgagtcgcccaatcactttagcagagtgtttaagaaagtttatggggaatcgcccaagtcttataaagaaaggcagtaatcctgtctgggcctgagtgtatgaaagggttacaaaacaccaccctgatatgatactgttctaagtttcatatcagggtggtgttttctgtccttcacttcccaagcttctgctgcttaaactccgtggggctcaccccggtatattttttgaaaatagaagagaagtaggtagggtcattataccccaccagctcggctacttcataggtaaggatatcagagttcaacaggtattccctggctttttcaatgcgggttttgttgatgtattccgtaagggattcatcacataccttcttgaaggtgcggcttaggtgggagggggagatgtgaagctggtctgccaatgtctccagggacaggggctgggagaggtggctgtggatgtattttacggcgctttccaccagcttgttctggctgccagagcttcccagaaggctttcccttacagaggtcatcagagtgagagtggactcctgcagggagaaaatatcggaggaattctggatcctggcaaggtattctgtgtctggggcagcggcttcccgcttgatcaacaccctggagcagatgtaataaatctgggagcagatatttttcacatcccgggactggaccaggttgctcttgaacttcatgaagatattgttcaggattccctgggcatcatcgaactgccagttgttgagacaattttcaaaatggaacagatccatggagttctccgctgtgagatcataggcgttgccgttcaccggctggacaaacagggagaggttttcctcagaataaaagttcagcgtcagggcatagatggcttctgacacagcagctccgaaatcctcggctccactatggcattggctgattcccacagctgtatttctggaggccagggtgccggcaatctggatgatctcccggcagttgtcctctatgtcgccgggaagctgttcccagaattttcccagaaaatagatggtgatgatcagattgttgtatctgtagcagtaggcgttgcgcttctcatcaataataatgtttttcagggctgcaatgtcatctcccatgggatccatacggaaggcggcaatacaataaaactccaggggaatggccaatttgtccagccgttcctgaagctggggcgtcaggggctggtctgtgagctcctgtaaaagctgatcctttaaaaaggccagctcttcctccttcatggaggaattttttttggatacgatgagatccttctgggcctcctgtactgcctccagaagctcttttttgttggtgggctttaaaataaaggaggatacattgtaccggatggccgtctgggcataagcgaagtccgcatatccggtcaggaggatcaccttgatgtccaggtggttttcgtagatgaattttgccacctccaggccgtcggcttcaggcattttaatgtccgtgatcacaatatccacaggctgcgccttaagaaactccatggcttccaccccgtcgctggcggtacctgccacctcacagtcaatggaagaccaattgataaaatttgcaatgcctttacgcatggtggcctcatcgtccaccaccagcagcttaaagatcatagagattcctccttttttatgggaatggtaaaggaaatactggtacatacattgggggtgctggatatgttcagccgggctttttcaccaaagagcagctccaggcgcttgtccagattccgaaggccaatgtgggtgtgggaatcctctgcggaggagacaatgctgcggatatcagggatctcggcaaagcccaccccgttgtctacaatacagatttccatgtgttcgtccttacgttcaatgatctgaatagccagcttccccttgcccttctttggctccaggccgtggacaatggcattttccaccagaggctggatacagaagcaggggatctggcagtggagcagactgggcggaatctgaatggagcaggaaattttatcctcaaagcgcatctgctggagatagatatagaagcggatatattccatctccttttccaggggaacgaaggcccgctccttggaaatggtattcatcttcagcagctctcccagggagatgaccatctgatagatctcttcattgtcgatcatctgggccttccaggcaatggtgttcagtacattgaacatgaagtgggggtccatctgggcctgaagagcctgtatctctgcatttttcagcaataactgcttctggaaattgtccgtatagtaaatgtccagctgccggagcatttggttaaaggactgggcccacacatcaaattcatggtacatcttcatgggaggaagggtggactgctttccgctggaaatctcattaatatgaaaaaccattttattgataggtcttgtgactgcctgactgataataatggctgccagcagggccaccaccaaagtggctgccaaaaggaggagataggacttcagggtattgttcaggtccatgagaagcagctccttgggtgcggccacggctgaggtgaggccgatctcctccagcttctgggcagccacatagtaggaagccctgccaagcgttacctcctggaaggagatcttctgcccctgaggctccattttttcttgaagctcctggctctggtcagccatgtcttcattggagaggagctggatctgaggactgtataaggagatgaaccaggcggggtccagacccttggcgcagtaggcaagccatttgtcagagtcaatgttcagcagcatcatgcccatgtgccggcctgtgttgctgttgtatagattccgggcaaagtacagatttttttcatcagagggcagggtgaagcacatgaggcggctttcctgtttgtccgcatagtcccacagctccaggcttttctccttggtggcctctaagcttccggaggtataggtgtgaaaaaccgttccgtcgtcacagatcacatagatggagttggtgaaatttttgctggacagggggctgctgcagtaaatataggacatctgccgttcaattaaaaagcgcatgttggcctctgagttcttgagcttggggttttccagaacatcagcgatgagattgttagccatgaacagggggatgatggaatcaatggtatctatctgagcggtgattttttcatttacctggtttaactggcgggtgatggattcctgggagctgcttcgcagtatgctggaagtcctgttataataaaagaagacagagcacagaaggacaacggtgacgatcatggacaccgtggctgtgatgaagaaacgcagggtgggacgtcttacttttatagatgcagttggactcatatgcagcctccttatatatatgatatgaattgatacaatgcaggacaatcccatgcagggccatggccctactgggggaagtgcccaaatagatcagggaaagatcctcttaattatggcatatttgctaaaatgcatcaatgtattttaaaacaatgcggaatattccaaagaaaaagtcaaaattttaaaagggtcttttcccttggaaatacatacccggacaggacttggaattcagttgttttcatgcggaaaatttccaagaaatggacaaggggctttattaaaatcccgccacacctggactataatgaagacaccaaaaggaacacggccacaggcagtagggggccggatccgtgaaactaagggaaataaaattaggaaagaaaaaggaggaacaaaatgagaaagaatgttatgaaacgggttcttgcctgcactttggcaggagttctggcagcaggtatgcccatcagcgccagtgcggatgacggggaaaaagtggtgcttaatgtgatcaactaccatgtaggtacggactatgcagcagaatactattcctatctgtttgaggaattccaaaaaacagaagagggcaaaaatgtggaatttaattttgaggaaattcccaccacagatgcctacaaccagaagattaaactgctgatctccagcggggacctgccggacattgtatttaacggcggaaacaatatcaccgagctggctgcaaaatccggcaaggtggcggacttgactccatactttgaggctgacccggaatggaaagcactctttgatgagacctccctggaatttaacacagtggatggaaaaatctacggtgtgccagtatccaaagaaatctcttatatttattacaataaagagctgtttgagcaggcaggcgtagatgcccctgaggttgcctttgagacctgggatgatttctttgcggcctgtgacaagctcaaagaagcggggatcactcccgtaggcatggacagcgcagactctggctggcttaccaacctgtggatgagcgcattgatcggaaccaacggggatgcgggaaatgagtggatgaacaccatgtatcccacagattttaacactcctgaggtagaggcagcagcagagaccatccagaagatgttccagcagtataccacaccggacgctgtgggcggaaaatatgaccccatggcaacccatttcttcaacggcgaggtagccatgttccccaacggaccatggatgatcccggatttctccgagacagagaaggctccggagggctttgccgacaaggtggggatcatgctgatgccctgctatggaatggaaatggttcccacacctggagatatggttggagcaacggatgagaaaaagattgaggcagccgtagccttcctgaagtttgagaccagcccggaaaatcagatcaaggcactggaaatgacaggccttcagcctgtatccaatgacctggaaattccgtcctcccttacagagagcgatcccctcatggcacaggtgctggatatccagggtcaggcaaggatgacctatggacagaaccaggcctattggttccagaataccattgataccttctccacacagcttcctgagctggcatacgacaatatgactgcaaaggaattctgtgaaaaattaacagaatctgcggcaaagaaccagcaatagacagggaaccacaggtgacacacaagattcgcaggtgaatgcctgcgaatctgcttttttagaggttaaaggaggattctatgagaacaaaaaatagaggggtctggatcgccctgtttaccattccctgcatgattctgtttgccattgtctatgcggcccccatcgttacagtgctgtacacatctttttgtgattacaccacattttccgggccggtttttgcggggattaagaattttgttacgattttcagcgatatggatttcctggtttctattaagaacaccctggtgtgggtggttttacagtctaccttccatgtgggcctgggacttctcatggccctggtgctgcggcgcaagcctaaaggctggaaggtggtccgcacggcctacatgatccccaatattattcccactgccgccacgggagtgatgttcacacttttgctgaacccttcctttggagtggtgaagcccttcctggactttttaggtgtggaatataacatggtgcccaacctgttcggcaattccaagtatgccttctggacagtgactatgacctggattttgtattctggctttaacaccattattttcctggcggaaatgggcgccattgacaaggagatctatgaggctgccactgtggacggggccagaccctggcaggtggaccgctatcttaccctgcccctgatgagaaacattttcgggacctgcgttaccctggcttctgtagctatggtctctcagtttgatattatttacatgaccacaaagggaggacctggaaactccaccctgaatctgcccatctacctgtacaaaaccgccacactggaaaacaactacggcaaggccaatgccgtgggcgtggtgcagatcgccctgggccttgtgctggtgcttttgatccagcgtctgttccaggagagaaaagaattaaaggagggaagataagtgaaaaagacatcaaaggcaacagttgtaactgcaggcattttcaaatacctgtttatgatcctttttgttctcatcgccgtgggacccattgtgtgggcatttatcagttcctttaagacgtattcagagatcaactcctcagccctgtcctggccgtcctcctttcagttggacaattacaaggcggccttccagtatgcgcccattgccaaatactttctcaacagtgtgatcattgtggggtgcagcgtgcttctcaccgtggccctggtggccatgtgctcctatattatctccaggtttgagtttaagctgaagatcctcattgtgctgctgatctcagcgtccctgatgctgcctgcccaggccatctcccagccgctgtttgccatgttccagaagatggggatttttgacaccaagatcggtctgatcattgtgtactccgccatgggtattcccatgtccttcttcgtcatgaccagttattataagaccatctccacagctctggaggaatctgcctacattgacggagccaccttcctgcagaccttccttcacatcatcctgcccttggcaaaaccggggcttgtgaccattgccctgctggagtttatcaatacctggaatgaattctattttgcattaatgctcacaagcggtgacagggccaggacagtgcccattgccctgaattattatatgggtaccttcgccaacaattattcggccttatttgcggcagtggtgatgaccgtgctgcccaccatcgtgttgtttattatcctccagcgtcaggttatggaaagtctgacggcaggagcagtgaaaggataacgtacatatggaacagaacaaagaggcaatttatcctgttgagccatggaagatcacagagacagagttttccatggagacaaattacagaaatgagacgaccttcgccctgtccaacggatatattggcacaagaggaacctttgaggaggcctatgcctttgatgtggaggaagggctggaggggaattttatcaatggtttttatgaaagcgaggacatccggtacggggagtggaatttcggcttccccaccagaagccagtcccttctcaacctgccaaatggaaagggaacccgcatctatctggaccaggagctctttgatatgaggcaggggcagatcaaggactattgccgggtgctccatatgaaggagggcgttgtcacaagagagctcacctggatttcccccaagggtaggaaggctgtcctgtcctttgaacgtctggtgtcctttgcctgcaaaaatgttttggcccagcgggtgacgatccgtcctttggagggagtccgtgagatccggattcagtccttcctggacggaaatgtggagaaccataccagaaagaccaatccccttgtggattacggcccctttggccggaggatccagtcagagtgctgtgaagaaaaagagggaaacctgtatttccagggaaaaaccttaaaaagcggcctgtccatggcctgcggaatcttccatgacaggaatatggctggaaacgtggaggatgtgcaggtcagtgagtattatggagaagtgaattttctgtttcaggtaccggcaggggagaccctgtgttttgataagtttctggtgtatacctctaccctggacctgccggtggaggaattgaagaattttgtggaacaagaggggaagaactgccaggacaccggttatgacacactgcgagatcagcaggaggcatatatggaagaattctggaagtattccgatgtgaagattcggggggacgatgccctgcagcagggaatccgctttaatcttttccatattatgcaggcagcaggccgggacggccgcactggcatgggagccaagggactgtccggggaaggatatgagggccattatttctgggatacggagatgtatgtgctgccctactttatctataccgcaccaaggctggccagacagcttctggcctaccgctaccgcaccctgcctcaggccagggagcgggcaaaggtgctgggacatccaaagggagccctgtttccctggcggaccattaacggagaggaggcatccacctacttccccctgggaactgcccagtaccatatcaatgcagacattgcttatgccttccagctctacgtaaatgtcacgggggatgaagaatttctcaaggatatggcattggaggtgctggtcgagactgccagagtgtgggcagacgtgggaagctttgccaggtgcagaggggaccgttactgtatctgtgctgtcacaggaccggatgagtacaatgccattgtggacaacaatttctacaccaatctgatggcaagggagaatatccgggacgccttaaatgccctgaagcatttgaaggaaacggatgaaaaggccctttccctgctggtggagaagctggggatcacccaagaggagacccagtattggcagaggatcgtggaccatatgtattttccttatgatgaggagcgcagggtctatcctctggatgatggctttatgatgagaaagccctgggatgattccaggattcctccggagaaacggcatcttctctatgaaaattaccatcccctctttgtctaccgccagcgcatgtccaagcaggcagatgccattttgggcatgtatcttcacagcaatttatttacagaggaggagctgcgaagaaattatgatttctaccaggaggtcaccctccatcactcctctttgtccacctgtattttcgggattctggcctgtgagatcggctactatgaggaggcctatgaatatttctcccagtctgccagaatggatctggatgactaccataacaacttctatgcaggcattcatgcagccaacatggcggggacctggcaggctattgtaaacggctttgcaggcctacgtaccaatggaggcaggctggagctgaagccttaccttcctccaaaatgggagggatattccttccacgtccggtatcagggaaatgtgatccaggtggagatctcccgggaggggatctgcctgacacttgcagaagggccggggctgagcctgtatataagagatgaggaaatctgtttgtgcgaaaaggagaagagatactttgaaaaaatataaagggattttttttgactgggacggaactgcggttctctcccgcaaggctcctgtagatgacattgtgggacccatgaaggccctgctgggaaagggtgtgaagctggcggtgatcagcggcaccaccatagaaaatatcgcagggggaaagcttccggaatattttacagcccaggagagaaggaatcttttcttcggactgggccggggagcctttaattatggctttgaccagaatggagagcggttttcctttggagaaaagcttcctgacaagaatacacttctaagaattcatgatgtgtgctatgagattcataaaaggcttttggagcagtatttcctgaacacagacattgtgttttcaaggcctaattattgtaagatcgacctgatggtggaaaataaccggggcgaggctctgtttcttcaggaaggagagaaggagcggctgctggaaactcttgaggcacatggtttccagggaggcctaaaggggctgataaaattggctgaggatattggcagagaattgggactggaagtgctggcaaccacagacgccaagtatttggaggtgggaatttcctgcaaaagcgataatgtaaatgtgctggcagaatattttcagagagaatacgggatcatccccagggattgcagctattggggggatgaatacatgggctttggggaagggattttcggaagcgacagctttatgctcacggacaagacaaaggagggggatttcttcgatgtgtccgatgcccccggagagcgcccggacggggtgaaggtgctgggcggaggcgtgaaaacctttgagaactttttgatatcacaaaaccaggacaattgatattttaagagagagtctttgtgtgtaaatgttcattcatttatcacacaaaggctcctttttattcatggggcaggacggccctttgaactttctatagaaactcttgatcatataataatactgggaaaaatgtgtgttgaaggggacggataggaattgtcttttggggtaatttggagaatattaatagaggattaaaattgacaaaaaaccttgaaaattgtaaaattatacaagatgagtttaatttaaaaaataaagcatccagagaaaaatatggattgccgggacagcttcaagattcaggaaaaatattagaatggagcagggaaatcagagaatgaaaggtttatggatgatcatggggggatgtcttgtgctgacaggtatggcagggtgtgcctgttctcaaaagtctgtgtggaaggacagcctgttttcctggaacggggaggccatgctgccggaaagggaagatcagatccaggaggcgatggaggtcctggactgcggcgcggtttaccaggaggttccccaggaagccaaggaagaggtggtactggatttccttaaacgcagagaggccgccggacaggaggtgtattacctggctggaaggcctgagtgggcccttcaggaggatgcccgggaaatgtcagagacagtgaaggcagccgccagatggaatgaaaaagcaggggacagccagggctttgccgggattgtgtgggacgtggagccttatctgctggaggagtgggaccaggataagacccaggtgatggaccggtttgtgtccaactgtgaaaaagtgtacagggaggcccaggagcttggcttaaaggtactggtgtgcatccctaatttttatgaccgctcccagacccagaaggggctggagaagctgatccagtccggctgtgacggggtggcggtgatgaattacaacaagactgacgaggccgggcagattgcccaggaggtgactctggccaggaaatttaagaaggggatcgtgaatattgcagagctgcagatgcccggcacccacgatctcacacagagaaatacctattattatgatggtatagattcagtgaaggaaagctttgaaaagctgaaaaaggaattttcctattccggtctggccttttcctggcattatctggatccggccctggagctgatggaaagagatggggacagttgacaggaggaagtctatgcgtgaggttttaagaaaggaaaagaaatacttattgtcagcagaccaattccggcggctggatggttcttttgagaaggcgctccagggagatgcccataacggccctttgggatactctgtgcgcagtctgtattttgacagcctggatgaaagggatttttatgagaaagaggatgggctggaggtaagaaggaagatccggatgcggatctacgatccatcagattccactgccatgctggagatgaagcagaagcagggggaaaatcagaagaagcggtccctgcaggtttccagggaggacgcacaggagctggccagagggaattattcctgtctgctggcctatgaggattcttttgcgtcagagtgttatggcctgatgaacctatactgctacaggcccaaggccattgtggagtatcgaaggaaggcctatgtggcaaaggagaacaaaaccaggatcacctttgattttcatatccgggccacggaaagtgaccttcggatctttcatgaccggctgaatctatcgccggttctggacccttatcttgtggtcatggaagtgaaatacaacggatttttgctcagctatataaaggatctggtgagcatggagggaaagagtcccacttccgtgagtaaatactgcctgtcaagaagcgcaggcctgcattacttattctaacagaaaagaggcagtagttatgaaagattacatgtatacaatatttaaagacacagggaatttaaccattgaagagattcttctgcacatcctggtgtctgcttttcttggaggagtcatttatctttcttattattttacccatgcaggaggggtatattccaagaaatttaatgtatccctcatcaccctgaccgtgctcacggcaacggtgatgactgttattggaaataacatcgccctctccctgggtatggtaggtgctctgtccattgtgcgtttccgtacagccatcaaggattccagggacaccacctacatattctggaccatcatcgtggggatttgctgcggtgtgggtgattacacggtggcagtggtgggaagcggtgttgtgttcctggtgctgcttttgctgggacgagtgaaaaacgacaaccggatcctgctgatcatccggggagccagaaatatggagcgcaggatcgaggcagtggtttttgactattttgagtcaaaggccatgctccgggtgaagaacaccagccgggaatccattgagctgatctatgaaatgccccggaaaacctatttgatctccaataaaaaggaaaaaagtatcgcagaatctctgtatgagctggacgcgattgaatatgtaaatgttgtgacccagaatgacgagatcagcgggtaaggcctatgaacagtaaagtcaaatatataggctcctttgtgcttttctccctggttgtcctgctcctggtaaggaacgtggagccaaaggtcattcgggtccagcagcacctgacctataatacccaggtggaggataccagcctttccattgacaaggtgaccttctcctcccaccttcctgtggtttccattgatacaggagggaagaccattcccggaaggcctgccaagggccagaccgtgcaggaggtggtgaatacctatatccgtgcacaagtgcgcatttgggaaaaggagggcaggctcaatacccttcgagatcaggcagacctggacgtccaggcaaacatccgggtaagggggaattcctccagacattttgacaaggtgggatatctgctgaaattcgtggactccaaaggaaaggagcagccagaggaggtcatgggcatggaggagcacagcacctgggttcttcacggcccctatctggacaaaaccctcatgcgcaattatatgtggtacaacctgtcgggacagatcatggagtgggcgccggacgcccgtttctgtgaagtgtttatcaatggccaataccagggcctctatgtgatggtggagcaggtcagcgtgggtgagggcaggctccagattaaggaatacgatgggaaggctgatgtgtccagctacattatatgtgctgacagagagagcatgaacgatgtatattatctgcataatttcaccaaatacaccatgcgcttacgcagtaagctggaggtgaaatatcccggcgggaagaaaatgaccccggagttaaatgaatatatcagcaaggatttttccaaatttgaaaaggcgttgtattcctttgactatgacacaaacctgtatggctatgagaattatatagacagcagcaattttgcccagtattttctcatcaatgagatcacccagaacacagacgcgggaattttttcaacctatttttacaaggatgtgcggggaaagatcaaaatggcagtgtgggattttaataactgctgtgacaattacattgatgacgagattcctatggcaggctttattatgcagaattatacctggttttttatgctcaccaaggatgagcggtttgtggaaaaggtcattgacctgtataaggacttaagacaggatctgctcagcgatgaagccatgcacacgtatatcaccgatgtacggaattatctgggggcggccgtggagcgcaatgctcaggtgtggggttatagctttgagcctgaagaggacctccttccccagggaaggaagatcggctcctatgaggaagccattaagcagtatgaacacaggctcatcagccgcctgggatggatggacaaaaacattgagaccctgcgttcctacagccatgagtctgtaaacaaaaaattcaaccattgaggaggggcgcccttgaagaaatttttgatcacggctgtttcctgcatccttttggtatttcttttggacacggcgtattatcaatggggcttttatattgatcttcacccggataaggagatcaccacctttaccactgtacagggaaaggagatcctggcggataccggatccggaatgcagccctatgaaattaagggagtggatatgggggcgggaatcccgggacattttgccacagagtatgcaattgacaaggagacctatgtccgatggttttctatgatccaggacatgggagccaacaccatccgggtgtataccattctctctccggatttctatgaggccgtgtatgagtataataaggataatccggatccactttatattcttcacggtgtgtgggtgaatgactatgtgcagaactcccatgtggatgcctatgatgacgcttttttgaagacctttgagagggactgccgtaccctggtggatattatccatggaaacaaaaagctgaatctgggctacagtgcctcaagcgccagcggttccttcaaacgggatatttcccagtgggtgctggggtatattctgggcgtggagtgggaagacgtgacagtggcttacaccaaccagatgaaagaggaaagaaacagctatcagggagactatatgtataccacaccagatgccaatcccttcgaggcccttctggcccaggtgggagacgggatcatatcctatgagaccagccggtataaggagcagcgtctggtggccttttccaactggcccaccacggaccctgtggagtatccggacattgtaaatcagatatacatgaaatgtgcccaggtggatgtggagcatattcagacaacggataaatttctttccggacagtttgcctcctatcatatttattcttactatccggattatctgagccgctatgatgagtggaagacagagctgccctatgcacagaaatacaaaatggagaacggagattataatacctatggtgtatatttggaaatgatcaaccggcaccaccgtatgcctgtggtaatttctgagttcggggtacccacctccaggggaagggcacagctggactttcacacggcccgctcccagggatacatgtcagagagcgagcaggcagacgccctggtgagctcctataaggatattaaaactgccgggtgtgcagggagcgtgatctttacctggcaggatgagtggtttaagaggacctggaacaccatggccaatgtggatttaaatgatacagcctactggagtgattttcagacaaacgaacagtttttcggtctgctggcctttgatcccgggaaggaaaaaagtgtgtgttatgtggacggggatgtgtccgaatggaccaaggaggatgtgatctctcaaaacggggattttcagctgtccatgaaatatgatgaaaagtttctttatttccgcatatacaaggagggactgaatttccagaaggagaagctatacattcctgtggatgtgacacccaagtcgggaagctattatgccagggagcaggatgtgaaattccagaagccggcggactttctcctggtgctggacggggaggaggaaagccgggtctttgtacaaagccgctacaatgcctttttggcagtttatggggaggattttcaggaggggaatttttaccaggatccgcccaagaaggatgcgccggattttcagagggtatatcttgctcttcagatccggaacgagaaggtggaggatgtgtcccagcttctggtggaaaagtttgaaaccggacatcttacctatggaaacggcaatccccagtgttccgattataattccgtgtcggattttattgcagaaggtgacaatgtggaaattcggattccctggcagcttttgaatttttcaaacccctccaaaatgcaggtccatgacgattatattgaaaactatggggtggaaaatctgaatatctcggagatttctgtgggaatcggcagcgaagagaacaaagacaccaggattcccatggaccctctgcctctgaaggggtgggggaagcatccaaccttccatgagcgtctcaaggaagcctattatgccatgcaggaaatatggagccagtgaggcccttctgcatgggagtaagagaggaggagtcttatgcatgtgcttggcctgcagccagagaaaattttatatttgtacatggcaggctgtattgcggtccttctttttaatcttttctatatttttattgacaagcataaaaacagaaagctggaaaagcgcagcctggaatttctaggtttgataaaggagcagctaaagcgcctggaggaaggactcccggtggaggagtctcatttgaagcttttggagaaaaagctgcgccgagtggaaaaaatgcgggcctttgaattctctgtggatgagatctcaaaacaggccctgccgcaaaatccggaggcttacttgaagaaaatgcgtccggtatttatccggctggtccaggtatatgagaagcgggacgagattgagcaggcttattttgtgagccttattgagaaattcgggattgaccgggggcaccggtcctttgacggaatcattgacctgcttgtgcggctgtccatttccagggatgtgtatgtgcgggaaaattcccttcaggccttattttccattggaaacggggatgctgtcctggcagcctgggagaaaatggaggccaatggacattaccacagtggaaggcttttgtcagaggggcttttacggttttccggagaccggacagagctgtccaaaaccttattttccaggagaaaagaattttctgtgaagcttacccttccggtgctgcagtttatccgaaggtacaccggggagtttcaaaaagagatgctggacctgctccgtcaggagagagaggacaaggagctgcgcctggaggctgtgcggtatttcagaaaatatccctatgagcctgccagagagctgcttcaaagatttgtgtggatgtgggactgtgtggactgggaatactcagccatggcggcactggctctgtgggaatatcctggcattgacacagaggaatgcctgaaggagggcctgcgggccaccaactggtatgtacgtcaaaactgtgccctgtcccttattgagggcatgaagatcccaagcgcccagctttatgatgtgtataacgggaaggaccggtatgcgcgggagattctccggtatgtggagcagaaggcagggctgtcagaagaaaagatggagttgatggaataaatgttcgatacagtgaagtggttttacagcgttgtgggagtgttttttgtgatctatctgctgggatattccacctttcttctggtgtccgtggtcagcggggcgttaaagctctaccgggagcataagatgcgcaggtatcacaatgagatcgtccatggatatgatcttccggtgagcattgtggttcctgcctacaatgaagaggtgacggtggtggacacggtgaagtccctgcttatgatggactatcacctctatgagatcgtggtggtggatgacggctccaaggatcacaccacccaggtgcttttggatgccttcccttttcagaaggtaaaccggcccatttacagaagaattccctgtaagagagagcggcaagtgtatgaggcctccataaacggaatctcagtcaccctggtccgcaaggagaacggtgggaaggcggatgccctgaatatggggatcaatgcctccagatatccctattttatctgtatggacgcagacagtgtccttcaaagagattctctgaaatttatcgtgcgccctgtgctggaggatgacaccgtggtggctgtgggaggtcttgtgcgcatttccaactatgcggtccttcacaagggggagctggaggaatatcatatgccctggaatcctgtggtgggaatgcagatcctggagtatgaccgttcctttatggcttcccggatccttatggaccagtacaacggcaacctgatcatctccggggccttcgggctttttgagaaggagacggtgatcaatgtggggggctacgatgccagtaccatgggagaggatatggagctggtagtaaagcttcacgccttctgccgaatcaatcagcttgattacgggatccgctatgctcctgatgccatctgctggagtcagtgtccctccagcattaaggatctgagaaaacagcgcaggagatggtatctgggtctgtaccagtgcctgaaaaagcaccggaggatgttcctgactccggagtttggggcagttggttatatctcttatttgtattatctcatatatgagctgctgtctcctttcatcgagctttttggcctggttaccattgggctggcttatatggtggagttgatcaatctgccttttatggtgctgttttttgtgatctatgcggccttcggggcagttctcaccctcaccgcctttctggccaggatttatacccagaatatacggctcacccctctggatgtggtgaaggcagtgtatttgtgcatagcagagagcgtgtttttccgttttatccaggcggttaccagaatgacagcttttgcgggatataagaaaagaaagaatgtgtggggacagatcaaacggcagaagatccagctcagccggggagaggagggagagaatgcaggaaagaaggaaaagacagacgggaaaaaggaataaaagaagattttcactgcaggcagtcttgattttggcctctttcaccattcttttgtggcccaggccctgtggggcggcctcccaggtgtatctggcaggagcggcggatgcctggccctttgagttctatgacagaattcagaaggactataggggaatccttccggatatgcttcgggaggcggcagagaaagcaggagtgaccctggaatatatccagccctcccccagagaccaaagactttctctggccgccaatattcaagtggatgccatttccaccgcagggctttccacagaggaatggaaggagaccggtgcaaaggccgggcctgtgctccttgcgggggaggatgaggaggaaccctggatctatctggcttacaccgaaagcatggatgaagagaccagggaaaagcttcaggccgctttggaggactttagcaaggaagagatcgagaggctgtatctttcttatgccagggaggaagaggcggccagaaaaagtccttttgcgggagccctggtatggtggctggttttggccctgctggttctggccctgcttgtgggcctgcccctgctctactggaaaaagaagaaacaggcagaaaagctggcctatggggacaagatcacaggaatgaataattttgacggattgatgagaagctattcacaaactgtggtggaccaaaaccggtcccactactgtatggtgtatatgtatacgggagtggataccattgatcacatctatggctatgaggaggcccatacggctgtgcgtatgatcgcccgggcctgtgagcctttgctggaggagcaggagggaatggccaggctccacgaattcagctttgttttttatctacgctatagcaatgtggaaaagctcaaggagcgcatggagcacctgctggacgaggtggagcatgcttttgaaaagaagcggtattttctggatctgcacacagggatctaccgtctgggaaacggggacagggatcctgggaaaagtgtccagtatgcccgggtggccgcagagtatgccaagatccatgaggcagaccatgcggtgtacgatgagtttttagagagggagaccatctcaggttatgccatggagcatgaagccattcatggacttatgcacagagaatttcttatgtatatccagcccattgtggatctggccacgggaaaaatctgcgggggagaggccctggtgcgctggcagaaccccaacagagggcttctcaagcctgacgcctttctggacgtgatgaagaaaaaacagctcactggaaagatgaacatggaaatctttatccagggctgtcagtttctgaaagaacagaaggagaagggcagaaaactgaagctgatgtttaactttactgtggacaatgtgcgggaggaaaaattcccggggcacatttataagatcgtaaaaagctgccaggtggacccagaccaggtgatcatccagctaaaccagcttgtggagatgagccgcagccagcagttcatggattctgtgaggaagctgcgggaccttggctttgatgtgtatctggcgggcctggagctggacagtgtgttctttcagtatctggaatgcagggtgaatggcttaaagctccgcccggagctgatccacaaagcctatgcccctgagggaagaaaggtactggaggctgtgctggggctgtccagggagctgaagctgacggttctgtgtgtaggcgtggagaaggaagaggaagcagcgtatgcccgccgcctgggctgtgagatggcctcagggtattattactattatccagtgacccaggaagtgtttcaagggcttttagagagctaaccttaccattttgtaaggttgtacaggaaattgtaagccagaattatggcagacagtttcctgtttttttatacttatggtatcataagaaataagagaaaagaggaaaagaaaaatggcgttactggaagtttctaatttaaagaaaatatacagcacccgtttcgggggcaacaaggtccaggccttgaccaatgtgaattttacggtggagaacggagaatatgtggccatcatgggggagtccgggtcgggaaagaccacgcttttgaatattctggcgtcactggataagcccaccagcggggaggttcttttggagggcaaaaatattgtgagtttaaaggaatccgagatctccgccttccgccgggagaacctgggatttgtattccaggattttaacctgcttgataccttcagcctgcgggataacatctacctgcctctggtgctggctggggaggactaccgggaaatggaacagaagatccggcccattgcccagcagcttggaatctatgagatccttgaaaaattcccctacgaggtgtccggaggacagaagcagagagcggcagtggcaagagcgctgatcacccatcccaagctggttctggctgatgaacccacaggggctttggactctaaagcggcgggctatctgctggaaatgttctctgccatcaacatggcgggccagaccatccttatggtcacccacagcgcccaggcggccagccatgcaggcagggtgctgttcatcaaggacggagaggtcttccatcagatctacagaggacagaagacgagacaggaaatgtaccaaatgatctctgacacattaacgattttaacgacaggcggtgagtacaatgcgtaagagaatgtttcccaagctggcagccaccaatctggtgaaaaacagaagagtctatgttccttacctgcttacctgtatctgtaccataggcatgtattatattatgcagttcctcaccaaccacgatgccctggacggcatgtatggcggagccgatatccgtatggtcctgaacctgggagtgggagtgatcaccattttctccgtgatctttctaatttacagcaacagctttctcatgaagcgcaggaagagggaattgggactgtttaatgtgctgggcatggagaagaagcatattgggatcattttgctgtgggagcagttttataccatagttctcagctttgtgggaggtctgggctttggtattctgggaagcaagctgatgctggcgtttctcatgaagcttcttcagtttcaggttccctttggatttgaggtatccggaagcggaattagaaatactctccttgtatttgggttgatctttgcactgatgctgtttattaatatccgccagattcacctggtgaacccggtggagcttctgtcagggagcagcacaggtgagagagagcctaaggccaagtggctcatggcgctggcgggaattgtatctatgggtgccgggtattatattgcggtgaccacccaatctcccctggatgcccttctgttgtttttcgtggccgtgatcttggttatgctggggacgtatcttctatttacagcgggaagtatcgccatattgaagtttcttcggtggaagaagaaattttattataaaaccaaccattttatcagtgtttccggaatgatctaccggatgaaacaaaatgccgtaggtctggcaagtatctgtattttaagtaccggtgtgcttttaatggtttctactaccatatgcctgtacctgggcagggaggagatcacggagggtatgtatccaagagagatccaggccaccatctgggatgccacccaggaacagagcgaggctcttgttgaagagcttatggatgtggccggggaacagggggtgcagatctcagatttgtattattgccagagtctgacagtggcttgtctgaaggaggaagataatttttggtttgcccgttctgatgaatcggtttcaaatgcacaggagactgtagtgatctctgtgcttatggagaatgagtttaaccgtcttacaggggcagatcatcatttgtcagacgaccaggttcttctgtacacggaagatggagacacacacatggaaagcctccatcttcaggggcaggattatcagattcaatggctggatgattttccggaaaaagagtattccattgatggaagtgactactattatcttgtgctgaaccaagcacagtatacacgtatccagacggagcagaagcagatctttaaggacaatgcggtaagcagcaacctgatcatcagcgcgcagccggagctggaaaccgatgaggagaagacagcctttgccgagaaggtacgggaaaggttccgggagtttatgcaaaggccggaaaatgagaatgtaattggccgtgtagagggcaaaaccatgagtaatgcaagcttttatgcaacctatggaggcctgttcttcctggggctgttcctgggcagtctgttcttgatgggaacggcgctgatcatttattacaagcaggtttctgaaggctatgaggatcagagacggtatgacattatgcgaaaagtggggcttagccgcaaggaggtgaaaagctccatacgaagccagatacttatggtattcttccttccccttctcatggcagtgatccatattgcctttgccttccccttgatcagaaggctgctggccatcttctacttacacaacatccagttatttgccctgtgtaccttaggcacagtgggagtgtacgcagtggtgtacggtattatttatctggttactgccagaacttactataaaattattgggtaagagtccctgatttcagaattttttcaaatagacaggtcttctttcttctccggatgggggagggaggaggcctgttctggttttctcttgaatccccgggaattcggtgctacaatggaaaaagtgcgaatgagaaaggaagggaaaatcatgagaggcgagagctttcgcaggggaatcaaggacggcatccccatagggcttggttacttcgcagtatccttcacctttggtatgatggcagtggccggagggcttggcatctggcaggctgttttgatctcacttaccaatttaacctcagcgggacagtttgcggggctggatatcattctggcagcaggctcttactgggagatggccctgacccagctgatcattaatcttagatattgtctgatgtctttttcactttcccagaagatccgaagggatgtgccctgggtccaccggtttggggtggcctttggtgtcacggatgagatctttgggatcagtgccagccaggaggggaagatcagcccctattacaattatggagccatgtgtgtggccattcccggatggaccttggggaccttggcaggagcggtttcaggaaatctgcttccgccctttatgatgagtgctctgagcgtggccatctacgggatgtttctggccatcatcataccgccttccaagaccaaccgggcggtgctggccgtggtggcagcttccatggccctgagcagcctttttgcggtggttccggtgctgaagcaggtgtcctcgggctttgtgatcatcatcaccactgttgtggtggcaggcgccgccgcttatctgtgtcccttggaggacagcgacaagggggaggtgacagcccatgaagggtaatatctatctgtatattctggtcatggcaggtgtgacctacctgatccgcatgctgccgctggtattggcgcaaaaggagatcaccagtccctttgtgaagtcctttttatactatgtgccctatgcctgtctggcggcaatgacgtttccggccatccttacttctaccagcagtgtggtgtccggggcggcaggctttggggtggctctctttgctgcttacaaggagagaagcctgctcaccgtggcactgtgtgcctgcggtgcagtatttatcgtggagaggatcttagaatttgtagtatgaatatgtaataaaaagacaggccccggaattttatccggggcctgttttagaagtctgcctgtttcaaaggcttaatttcttttcggtaggcgtggcgcaggaaatatgcgcacaggagtcctgagaagatctctgcaaaggggaaggcccaccataccagatggagatttcccgtgagggacagcaggtaggcagtgggcagcagcaccacaagctgacggatcagggagatcagcagactggcaactccgtgggacagagcctggagcatggaggaggtgatgatacaaaagcctgccagcaggaagctgatgctgatgatccgaagggccggcacgccgatctccagcatgtagtccgaggcatcaaagagcagaagcagcttgtctgtgaaaagctggaagattccaaagcccaccagcataatgcagattgcatacataacgctgagcttaaatgtcttcatcagccggtccggcctgcgggcgccatagttgtaggcaatgatgggcaccatgccgttgttcaggccgaagatcggcatgaagataaagctctgaagcttaaagtaaacaccgaagacagcagtggcagtggaggtgaaggcgatgaggatcttgttcatgccaaaggtcatgacagagctgatggccatcatgataatggatggtacgcccacggcgtagatttgtttgatgacctgtctgtctggtttatatttcttcagactgatctgaatctctggatttttcttgatgtttaagatcagggccaggaacatggcaatgatctgtcccaaaacagtggcggctgccgcaccggcaacacccattttgggaaagcccagaagaccgaagatcagaataggatccaggacgatgttgatgatagcccccaggccctgagtgatcatagtgtagaaggtctgtccagtggactgaagaagtttttcaagggttacctggccgaagatgccgaaggagcagatgcagcagatggacagataagaggttcccaggtccacgatctccgccatgtcggtctgcataaggaaaaattttcttgtgacaaagatacccagaagggcgaataccacgtaactacatatagcaagaaatatggcattgttggcggcctggttggcccgcttaaaattacgttcccctaaacttttggacagaagggcatttacacccactccggttcccgtggctacggcgatcatcaggttctgtgcgggaaaggccagagatacagcagtcagtgcgttttcactgatccgggccacgaacatgctgtctacaatgttgtacagggcctggaccagcatggagatcatcataggaatggacatggtgatcagcagcttgttcacgggcatgacgcccattttgttttcttttcgttccgcttgttgtgcattcatgaaacgtattcctccattaagaaattgttaacagtatttctatctctcacataactgtccggaaattttccaagacggaaatttttgaagatccaggcagtgctgataagcgtaaaaaagaatcttttaggcaagattctctgcctgccccaggcaggcattgtgcctttgtgcagccgtagcatgtaaccggatacacaaaaaaggggccttacggccatagctagattatagaagggtgtagaaaacttgtcaagaaaaatcaaaggagggcctgcagtttttgacacgtcttccgtgaataaaaagacagcatactttgcaaaaagcaaagcatactgccttaagttccagcggccatgttagctgtgaataaaagccggctgcgtcaaaaaagcttgtctacaacggcattggaggccttctggttgttctccacacagatgtcataattctgctgataatattcctggtagagcaggtcaatgagaaagagctggctgaccttggcgccgatggagcctccttccagaggaccctcgttggagccgcacagcaggatggcgtcacagtaggcggccagaggggattttgcgaagcgggtgatgcagccgattttggctcctgaatttttggcgattttggccacgtggatattgtccttggttgcgccggagtaggagacaataataagaaagtcattttccgtcatggtggccgcagccatggactgcatatgagggtctgtgaggcagtacaccttaggcgcgatcctcataaatttgttgcaggcctcctgggcggagagaagactgtcccccacaccgaagaaatagatacgctgggcatcctccatataccggagaaattcagcaaaacggtcctggtctaataagtaataggtttcccggagagcactggtctgcaggcggagtacgcggtccgcggtccctcttagagaatcgtcaatggaaaagttgttgaccacagtgggtgcgccggattggttgggactgcgctggctgagagaaagcttcattttgaactcctggtaaccctggagcttcatggtacggcagaaacgatagacgctggtatcccccaccttgcaggcgtctgccaggtctgtgatggacataaaaagcacctgtttctggtttttcagaacgtaatcggccacttttttttcagcttttgtaaatcgggggtaagcggcttgaatttggagaatgaaattttcctcggccattatgaacaatcctctttctattataatactttgttatctttcgcgatacgcacggctcccaaaagtcctgcctgattgcctaactgggcaggtttgatgcgtacattgtggaagctgggcataatattattataaagagtgttttggattttgtccagaatgtattgttgtttcataatgcctcctcccagtataacacaggaggggttgaaaatatggatgagagaggacaggccgtaaatgatctcctggatccaccggtccacgatctcccggacggcaggctcagaaagccgggcaaaaatttcccgtccgttggtaagctctggaaacttttcctttgccatggccacaagggccgtggtggaggcatagcgttcatagcagccgctgaacagatcctttttgggatcccggtcctggggatgaatgaccatagccccgaattctcctgcggaaaagcagcttccgctgtagatcttcttgtccaggataatggctcccccgatcccggttccgtaggtcaggcacagaaagtcctgataatcttttccggctccgaaggtggcttctcccagggcagcggcatttacgtcgttttccacagccacagggacctggaacgcttcctggagaaggtctgccaccttggttccagtgtagcctggaatgttggaattggcatagcggatgatcccctgagaagagtccacctgtccggcagtgctgatgccgatgcggtggaaatcccggtaggttttcaggatctccactgccttttccatcacatggctgccccccagggcggcctcggtgggtgtctcccgcacttcctggagtgtgtcgtctctatagatcccggatttgatggaagtgcctccaatgtctaaaacagcaatgttcatatacagtcctccttctatacagccaccttcaccacgcattttttaagatgacggtttggttgtgcggcggcgctgggcagatggggctccctggccatgcacacaaggaaacggccgggccccataaggcaggaggcgctgcgctccacagtcacggtgccgaaatccccggagaagggatccagctccctggctggtccaagtccgatgagaatctgctctgtgccttcaatgtcaatctgaatgtccatgtattttttgtgtatttcaaattttagatcatccacatccttggcctcagcctccatcacattgacaaagacgtcctccccggacacatcggtgcggccaaggggaagggcggtcagatctgttttttccagaaaatcaatggctgtatccaaattttttgagattccccggtattttccaatattttcaagcatatcataaatcataaaagttttcctccttaataagaaaaggctgcccgaataaactgtgtcgggcagccttttgcgtttatggttgttatggggcagggaccttgggacttgccgcccggtgactgcgcacatggttctgtgaaagctgctgacaggctttgcacattatgatcatccttttactgcgcccatggtaataccttgggtaaaggatttttggaatagcaggaatacggtgacaatggggatggctgccaggaaggcaccggccatgatcagaccatagttggtggcaaattccgcctgcagagtggcaacacctaaggagatggtaagcttgtttctggaagccagcattaccaactgcatgaagtaatcgttccaggtgttgatgaaggtgaagattgccagggccgcaaagccaggctttacgatggggaaggcgatggaccagaaggttttccattcgttgcagccgtcaatcttggcggactccagaagctctcccggaatattttcactgaactgcttcatcaggaagacaccaaagggccagccgatgaggggcaggatcaccgctgccagggtattgtggatccccattttgctcaccatgtttaccagaggcacggtgataacctgtttgggaagtgccatggcaaagataaagatgctgaacagaatcttctgtccgtagaagcgtttctttgccagaacatatccggccagtgaggatgtgacgcacacggccagcatggtggccagggcgatgaagatactgttgaacatccactgggcggcagggtttttaaacagggtgacaaagttctctgtggtaggctgggcagggaaccattggggcggtacggcaacagcggcacttaaggatttgaacgctccggtaataatccaatagaacgggaagatgaagaggattgttaagaacgtgagaatcacaaaggacactgcaacaaaaggcgttacttttttcttagtcatatgtcaattctcctttctagtattctacatcatcgccgcccaggaacttgaactgagcgaagctgatcaaaccaatgacgactgccaggaacacgcccatggcatttgcatatccatagtcggagagcttaaaggccttctcatacagatagtacatgatggtggtggttgcgtaattaggccctcccgaggttagcagctgtatgagtgcgaagcactggaaggagttgatggtggtgatgaccacaatataaagtgtggtgggcaggaggctgggccatttgatcttccagaagacctgaaattctgtggcgccgtccactctggctgcttccaccagggatttgtcgatgttgcccatggcagctatgtacagaatgatgggctggcccacggatgtggtgagcagaatgataagaatggccagaagggcatattttttgtcacccagccacataatgttccgctcgatcattccacttccctttaacacaaagttcaaaataccgttgagggggtcgtagatccatttccatacaaccgttacggctacggttccagttacaaccggaaggaagaatacgcagcggaagaaggaacgggtgaaggcacttctttcataggtctgtgaagacacgaacagtgcgaagataaccacaataggaacggagccggctaccagaattacggtattcacaaaggatttctggaagatcgggtcctggaacatggtgatgtaattattaagcccgacaaaggtaaattctttcatggtgtatttgaaaaggctggtgaagattcccattgccatggggcacagtacaaatacgataaagaacaacagtgcgggggcgagaaacaagtaagaagtaatggtttcccgcattctgattttgtttgtacttttcatgttatccctccaaaaatttgggccttgcatggagcatgcaaggcccataaaaccacacgtttcttactgggcgtttgtgatggaagcgttggctgcctcaacgaattcatctgctgcagtctgaggatccttgtctccattcataactgcctgaagcattgggaaccataaggttctcatctctgcaaaaccatcaatggtgttgtagtatggagaataatatttggtccaggaagcgatggtgttcattctttcatctccgccataaacatcgccgaaggagctgcgaactgggaagcatccggtacggacaacgttctttggtccccattcagagtcatcacagatgaactgaaggaatttcttggaggcttcgatcttggcatcgtcgccgttatcaaaaatacagaagccatttacaagatactctaactctgtaacaccgtcttcagatggcagggtaacttcgatggtctcgattccattgtcatctaacagagtctggttggagttctgagttccaggtccccacagaagtgtgaaggaggtctgttttgtagcaaagttcttaatatcatcaccgccggcataggcagatccgtttaacagtaagccgtcatcaactgcttttttaataaactcaagagcctttacgccgccttcgtcattgatggtgtactcagtaacggcatcatcggtgatggcactgtcatacaggttggcgatgaaagcacgggttccctggtcaccgccctggccggagcagaatacagaaccaggcatatagcctttgtcatagaggcctttgatcactgtttcaaaatcttccgttgtccagccttctttaataaggtctgcaacgcctgcatcctctgccatttctttgttgaatgccatatagaagggagcggagctgataggatacatgtaagcagtgtctcctgccttacaggactgaaggagtgtgtcatttcccacgtcttttacaaagtcatcggtgaacatgtcgttcagctctgccagttttccgttctttccataggagatgatacgtccgggagcatcaaacaggacatcgcagatggtgccgccttcgatagctgctgtgatcttctctggtccggaggtgaaatcgatggtctcaagatttaccttgatatccggattggcagcttcaaatgcctcgatgatggtctgctcgtaggcacctggctcagcgtccacactgtcctgggcaaaggttgggaatgcccaccaggtgatctctgtggtgtcagctgcagaaacggatgctgcgggtacgagcattgagcctaccatagcgcctgccagaactgcggataagagtttgtttttcttcataacttagttcctccttgtaaaatacatgttatatagtttttaatagtttccttaaataaagtagagagtttttttccagcttccttactcttggttgacagttgttattgcctccacatatttctgagtaatgagcatgggccgtgtgatcacggagcctacaacagcggcgtgtacacctgtgtctatggcttttttcagatcctggggacaccagatgccgccctctgcgataaccggctttccacagtttttcgcaagatactccatcattgacaggttgggaagagaagtacctttggtgtagggggtgtagccgctcatggtggttcccaccagatcaaaaccaatttcagcggcgttcatgccctcgtccacagtggagcagtcagccataaagagctggttgggatacttttcccggacttccttgaaaaattcattgatggaagagccgtccgggtgaagacgtttggtggcgtccatggcgataatatctacgccgcattcggccagggcatcgatttccttcatggtaggtgtgatatacacatcgcagtccgggtaatctattttgataatgcctataataggaaggttcacggttttcttaatctctgtgatatcttccacgctgttggcacggatgccggaagctccgcccagcatagccgcatatgccatccgtgacataatgaaagaactgtgcaggggttcatcagggagtgcctgacaggatacaatcagcttacccttgatctgatttaaaatttcctcatgggttctcattcagaagattctcctttccctatttccaatcggtgtcacgggcttattgctgtcagattggattgaaaacagttagtactttcttgttgatgagattactatagcacctatggaaatatttttcaatatattttttaaaaaaatatttttttcttttttgttgtattctcacagagattgtgatatgattgttttacaaaatgacagatttgcataagaaaagagagggcaagaggatgaaaaagggaaaaaatggtgctttttttctgaattctaatctgattgtgcaaatctggagtataaaagtataacgcaacacaggaggtaccctttcctaaggttaccaggatgcaggaaagcggagaaaatccgtttccacagttaaacaaaaagaaaagaggtaaggatcatgtctaagtatgatgtatcaaaattccgcaatgtaacagtagcattaaatactccttttacatcttcagaagaggtggatctggcagctacgaaaaaggttgtccgttatttctgcaataaaggcgtgaaacagctgtatgtgtgcggaagtaccggcgagggtttcctcctggatgatacagagaggaaaaaagttgtggaggctgttacggaagaagtgggaagcgagatgaacattattgttcatgtgggaactgcttctaccaagagaagcgccgagctggcagcccatgcccagaaggccggagcccatgccacctccgcagtgccctgcgtttactatcacctgggagaagaaagtgtttaccgtcattggaccaagatcacccaggcggcagatcttcccttctttatttataacattcctcagctcacaagctttaacctgtccatgccgctgtttaacagaatgcttgagaatgagagagtagccggagtaaaatgctcctctgaccctgcacatgacattatgcgctttaagcaggccggaggcaaggactttattgttttcaacggtcctgacgaacagtatctggccggacgtatgatgggcgcagatgcaggaattggcggtacatacggggcaatgcccgaattatatatgaaactggatgaactcattaacatgggtaaatatgaagaagccaaggaagttcagggaattatcactcctctgatctaccgtctgtgcagtttcgcctccttgtacggtgcagtgaagacactgcttcgcattgatggctgtgacgtgggtgatcccagacttcctttccttccagtggacgacaaggatcctgaaattcataagctttataaggatatcaaggcggccattgagtatacaagtaaattataggaagaaagagaaatgaagaaaacagttgtttgtttcggagattccaatacccacggctatcatgcaggaaacggcggacgctttgatgagacccagcgctggccaaagctgcttcaggggctgctgggggaatcctatgaggttgtggaggaaggcctgtccggaaggaccaccgtgttcagagaccctttgtttgaaggattaagcggtctggatgccattcatatgtgtctcatgagccacgaaccagtggacattctgatcattatgcttgggacaaatgacacaaaggcccgtttcagtgccacctcacgaaatattgcccagggtctggcccggcttacagaaaaagccaagaatacggcaggggcctggagacagaagccaaacatccttttgatcgccccggtacccatggagaaggaatacgagagctcctgcgtgggaggtgagatgggaccgggctgtgaagagaaatccagagatctgggatttcagtttgagaggattgcccgggagcagggatgctgcttcctggacgcaggaaagattccgggagtgggagtgatccccacggattacatgcatttaaatgagaaatcccacagactgctggcacaggaagctgccaggatcgtccgggaaatggcagaaaaagaaaatttataaaattatcacagccggcaggaaatgccggctgttgttattgaataggaaagttcgaaggactttcctattcaataacaaccctccgggggatgcacacaatgttatgtgacagaaacttccaccgaaatttactgtgagaatgcattttctcattggcattccctgtaatcggttgctataataaatatcgaaggaagacaaatcaaaagaacacataaggaaaggtggtatatatatgaaggtattgatcgtgggcggtgtggctgctggaacgaagacggcagccaagctgaaaagagaggttccggatgcccaggtgcagattatcacaaaaagtgaagatatttcctatgcaggctgcggactgccctattacgtgggggacgtgatccatgagaaaagccagctcatcgtcaattctccggagaagtttgccaagcttacagggacagcagtggagacgggaattgaggcagtggctttggaccgggaaggaaaaaccgtcactgcaaaggatctgaaaaccggtgaggagaaaacctatagctatgacaagctggtgatcgccacaggggcctcccccattgtacctcctgttccgggcaaagacctgaagcatgtgtatgtaatgcgcaccccccaggacgcccaggagctgcgccaggcagtggaggccggggagattcagcgggcagtggttgcaggtgcaggctttattggccttgaggtggcagagaaccttcatgcaagaggcgtgcgcacggtggtctttgatatggcccctcagattctcacccctctggatccagaaatggcagagtatgcggaagagcatttggcggatgtgggaatttccgtgttcaccaaaaccaaactggaagctattgaaggggatggcaaggtagagcaggtggtgaccaaccggaaaaagcccttcaaggcagatgcagtcatccttgccctgggtatccgggcgaacacggactggcttgcagacagcggtattgagcggatgcccaacaaaaccgtgaaggtaaatgagaagctggccaccaatgatccagatatttatgccctgggggactgcgccatggtgaccaaccgcatcaccggacaggcggcctggtcacccatgggctcctctgccaacattcagggcaggatgctggcccaggttctgggaggagaggacagagcctatcccggggttttgggaactggggtatgtaagcttcccggcctgaacgtgggaagaaccggacttggagaggagagcgccagggccgttggctttgatccggtcactgtgatcacggtggtggatgataaggcccattattatcccggagccgccaattttattgtgaaaatgatcgcggacagggcaacccgccgtctgctgggggttcagtgcatgggaccgggagcggttgacaaaatgattgacattgccgttacagccatttccctgaaggcttctgtcacagatctggaatatctggactttgcctatgcgccgccgttttccacagccatccatccctttgcccacacagtaaatgtgctgttgaacaagctggacaaagagctggacagtgtaactccggtggagtaccacaatggagcggtacagggatatacagtgatcgacacaggaaatgcacctgccatagaaggggctcagtttgcggattataccaccttcaaggaggattttccaggacatgacagacaggagaagctgctgctggtgtgcaccaagggcaagagagcgtaccttacacagaaccgtctgaaggctttgggatacacagataccaaggttttagagggcggcaccttttttaacggaaaagagattgacacagaagaataaaccggagttcgtacttcggagaataaaaaacaataaccaggaggattgaataacatggcaaccttaaccatcagcccggaagacgagaaaaaagtgaaggcaatgggatttctcagtaacaagggaacagacaatttttcagcacgtatcatcacagtaaacggcaaagtaaccgcagcccagcagcgtgtcatcgcagaggcggcagaaaagttcggcaacggcataatcacctataccacaagactcaccgtggaggtcccgggaattccctatgacaaaattcaggaatttcaggattatattgccagggagggccttgtcactggaggcacaggctccaaggtacgccctgtggtgtcatgcaaaggaaccacctgccagtatggactgattgatacctttgctgtctctgaggaagtgcatcatcgtttttatgaaggctatcatgaggtccgccttccccacaaattcaaaattgcggtgggaggctgtcccaataactgtgtgaaaccagatttaaatgacctggggatcgtgggacagtgtatccccaattatgacgaggatgcgtgcaatggctgcaagaaatgcagtgtggagaaggcctgtcccatgaaggccgccaaaatggtggaggattgtctggagttagaccaggagctgtgcaataactgcggaagatgtgtggatacctgccgttttgatgccattcctgagggtaccactggttataaaatctatattggaggacgctggggcaagaatattgcccagggacggcctcttggaaaaatcttcacagataaggaagagatgatgaatgtggtggaaaaggcaattctcctgtacagagagcaggggaagaccggggaaagattttcttctaccatagaacgtctgggctttgagaatgtggaggcacagctgctggcagatgatctgcttaagagaaaacagcagattctggatgcccagcttcacttagtgggaggagcctcctgctgacagcgccttaagccttccctgcagccaacgaggactgcccctgtagttgaagtgggcgcttagaaggaaacagcagattttacaggatggttacaacttccctgtgagataatgatataataagaatgtcctttcaggcagcggcctggggatcgctttattatatcttaatcttacaggggagtttttattatggccagaatattggttgtggatgacgaaaaaaatataaatgacctcatcgccatgaatcttcagatggttggacatgagccggttcagacctattccgggaaggataccacagagcttctggagagggagagctttgatctggcccttctggatattatgctgccatggatggacggctatgagcttcttccttttttcatgaaaaaagaaattccagtgatctatctcactgcccgggattctcttacagacaaggtgaaggggctgaagctgggggcggatgactatatcacaaagcccttcgaggcagtggagcttctggcacgggtggagactgtgctgcgcagaaagggcaggcagcagaattttatccaggtggcagatgtgaagattcaattcggggagcgccgggtctataagggagaccggccagtggacatgaccgcccaggagtttgcccttttggaagtccttgcccgcaatgcgaacctggccctttccagggagcagcttctggagctggcctggggatatgcctacggcggggagaccaggaccgtggatatccatatccagcgccttcggaaaaagctggggtttgagcaggtgatccagactgtgtacaaatacggatatcgattggagacgtgagatgaagctttggcagaaaatttttgggtgtatgttcctgctggcatttctgtccaccattttctatggagggctgacggtgagaaagagccacagggaaaacctggacagggaaattgagcgttcagcgggagagatggaccttctctacgaggctatcgaaaaagcagcgggatccatggagtcctggagggacgcggtgtcctggtatggagattactataggggaaaaggactttattttgcattatatgaaggagatgagcaggtttacaataaccagctacaggttccggagcagacctttcaatccatgctccaggtaaaggaagggcagaagcagctttatgtgcacaggaccaaagagaatgcctatatgatcacagccaaggctgttccccagggcgtccttttctatatgcgcagtattttggatgtgtaccgcacaaggctggaaaatatgagaaatctatttctgtggcttctggctttggcagccttgatggcaggggcggccctgggggcggcaagacttcttaccagacccctggaacgcctgaagaaaaacgtggaatgtatggaaaacggtgactatactgtgtgctgcaaggagggaaaggatgagatcggggcactgggagccgcctttaatatgcttgcccgcaccgttcaggccagggaggtatcattaagggaggaggcacagaaaaaacagcagtttattgatgctatgacccatgaaatgaacacacctctcacctctgtgcagggatatgccagcttcctcttaagcgcaaaatgttctgcctggcagagcagaaaagccctggaggccatagaggctgaggccagacgcatgagcagcatgtatgggaagctgagaaccctgcttcttttaaaagcggacggaatccagaagagaaagacagacctggaggaagtggtcctggcagtgaaaaaagaactggaacctttgctgctggaaaaaaacatgaaggtcacggaggaatatcagataaaatctatggacaccgatccggacctattacatatccttttatctaactttatccggaacgggatcaattactctatggaagggggcactgtggccctgcggtttttcagggacagagaggacataagtgtccttcaggtgcaggactggggctgcggcattccgggggactatctggataagatcacagagcccttctgccgggtagataagtccagaagtagacagaccggaggctgtgggatcggtctgtacctgtgcagggagattgtccaggcgctggggggcaggatggagtttaactcccatgagggggaagggactgtggtccaggcagtttttacaactgtgatacaaaatggtgatgtggaggaaagacccctggattaaactggaggtatcaattgaacaggaggatttctcatatgaaaggaaaagaattttttaagatcgcaggaacagccattttgggcgcagccctgttaacaactgttcccgttatgatccttgcacaggaggatgtggagaaggcgccggtgaccatccaggaggagacgggggatgaagcacaggtccagaaaaaggcggatgaggagctgatgcagccatccttaagtgaagtggaggacctgcgcaaggcggttgcggagcaggtgtcggatgtccagaacccaccggagaaaatacaggattttgaacagtatgaaaaggcaggtgttccgggcggttttgtggtgtattacgacccggaggtttatgattgccaggaacttgtaccagaagaagggaaaggtttcgttgaggcagattcttccagggcggcacaagtcaatgaaggccaggagacacagggaaagaaagagtcaatcacagaggagtccctgaagctggcgttaaaatccaacccggatgtgaatgtgaagatccgctttttccctgacatggataaggaagaggtgatcaatctttataatgagaagttgaatctgggggatttctccatggtttaccatattcttaatgagaaaggtgaggaggctgcgggccaaacggagacacaagacatcaagggggcaaatatattgacagtgaattcagctgaaggccagaaggagtactatacggttttgctgaatgtacctgacattggcatagcccctctgggcgccaaaagtgttccaagctttgccattcttaccaatacaactggatattatatcgaatattatattgctgcaaacaagaatggcagtgtggcagtggaattggaagccccggaaacggaatatgaggattttgacgatttgagaaagattgtggataccttggtcatggatgagacaatctgggatgagggcgaggttatgcggtacgcgaaccaggcttcaaaagagctggaagaagagcgggctgaaatggccgaacaagaaaaacaggtagtcttagatgagaatggaaaccttatccattcagagggccagccagtagaagatgaagaaggatcaaaagaagaagtaaacgaagggccaaaagaggacacaaaagaagaataattactgagaaagtgtgccgccgggacgggaaagttcggacggcacactttttccaactgggtttttaatccaaaccgcaggctgttttgaccataacacgattgcgccttgccagagcgatggccagatgacagccctctgtacaggcgcagatcttgtcagcacaggatacgatccaggcttctttgcttctgggaagcggccccagtggaaacatatgggcgcggatggcatgttcttctttatcgttcacatcaaaatattttttgctggcctgtgcggctgccttgggatggtaaaatacctgcatttccccagtgggaacctcatcccggaagtcgtagacacagaaatcatggagcagtcctgcccgggctgctgtctttgcgtcacagcccagctttttggccagggtccaggagatgtaagatacattgatgctgtgcatgagcctggtggtaaattgatgctgtttatatctgctgagttttaaaaattctttttcctcaagaatggcgcccacaatcccgaggaattcctggtcgatctcctcagaaatggatatgtccattggtatcacccctttgcctcttattacccttattatgtatcggaattagctgataagtcaagatgaaaaaatgcactttctgaaaatttaagaatttcaaggttatgcttgcgtactctggctgctcagaggtatcctaaatggtaagaagcagaaaaacaaagaggatccccggaaggaagcatacggccggagatggtgcaggaggaagaaaatggttcgttttgccacgattggaacaaattttattacagacagatttctggacgcagtgaaaaactgcccggagctggaatatacggcagtatattccagaacagaggaaaaggctaaagcctttgcagaaaaatatggggtaaggaaatggtatacagacctggagcagatgggttcagacaaagaaatagacggggtttacattgcaagccccaacagtctgcactgttcccatgctgtgcggatgatgaaacatggaaagcatgtgctgtgtgaaaagcctgtggccagcaatgggcaggagttaaaggaaatgatcaaggcagccggggagcacaaggtggtattcatggaggccatgcgctctgtatttgaccctggatttacggcagtgaaggacaatctatataagctgggtacggtgcgccgtgtttccttccagttctgccagtattcctccaggtatgacaagttcaaacagggtatcattgagaatgccttccgaccggaattttccaacggagccctcatggacattggggtgtactgcattcatcccctggtaaagctgttcgggatgccacaaagagtccaggctgaggcagttttcctggaaaatggtattgatggcgccggaaccattttggcaggatacccccaaatgcaggccgagctggtgtattccaagatcacaaacagcgcccttcccagccagatccagggggagaagggaaatatgcttatctgcgagatcccggataccagagaggttaccatctgttatcacagcggagagacggagaagatagctattgggaaaaatgagaacaatatgatctatgaggcgaaggaatgggcacgtctcattacagagggccttgatgccagggagcacaatgcgtattccctcatggaaatggagatcgctgaccaggtgagagaccagcttggaatcgtcttcccggctgatacgcagaggcgctgggaaatctgactacgtcaggaggcgaaaaatggatggctctaaaacggagtatggcatttatgtttaaatggaggaaatatggcagaaagtcaaaacacagaatgcaaagaatcttggcatgatgagtatttgaaatggatatgtggttttgcaaatgctcaaggcggcaagatatatattggaaccgatgataacggcaatgtcattggcgtgccagacagtaaaaagttgctggaagatattccaaataaagtgcgggatatccttggcattattgtggatgtcaatctgctgacacaggatggtaaagattacattgaaatatgtgtcaatccgagcagttatccggtaaattataagggagaatatcattatcgtagcggcagcacaaagcagcttcttaagggagccgctttaacagaattcttgttatcaaaaacgggatataaatgggatgcggttccagtggatggtgttacagttgaagatctggataaagagagttttgacatttttcggcgagaggctttgcgtagtggtcgtatgacagaaaaagatttgaacatgagtaacgaacagcttttggacagcctttgccttcttgagaatggtaagctgaaacgtgcagcaatcctcttgtttcatcgtaacccagaaaaatgggttacgggtgcatatattaaaatcggatattttggcgaaggttctgatttgcgttatcaggatgagattcatggttctttgtttatacaggcggatagagtcatagaattgatttatctgaagtatatgaaagctataatatcctatgacgatgtcactagaattgagacttatcctcttcctaaagcggcagtcagggaggcggtatataatgcaattatccattcaaattatgcggcattagttccaatacagatccggatacatgaggatgcggtatacatcagtaatgattgtgtctttccggtaggatggaccgtagaaactttgatggaacgacatcgttcacagccctacaaccccaatatagctaatggttttttccgggcagggtatgtggaaacatggggacgggggatagaaaaaatatgcgagacatgtaaaaaacatggtgttccaatgccggaatatacacttcatttagaagatattatggtaaaatttatgcctttaggacagcagaacgttttaaaagatcaaaatgtcctaataaatgacccattaaatgtcctgttaaatgcttcgctagaggaaatagttttatcagcaataagagaaaactctcatataacgcaggtacagctttctaaaaaactgaaccgttctgacagacagataagacgagttataaaggaattgagagaaaaagggattatcgagcgtgttggcagccgcaaattaggacaatgggttgttaaatagcatcttactcatagaaaattttcgggaggagatccaaagccggtgattttgtcagaacttttgaatctcttcaattggtgtcttgcagcgtccatcgccaaaagaggaaacgtcgaaatattcactttgcgattatagatttggaggaattatagataccagtagcagtaaaaaggcatgtccgtcttctggacgctgccggctatagggccggcggcgggtttgaagaccggatatgcctttttgcgtagaaaagttttgtgaatcctccttcagagcagttataccatctgaattatctgttattttcttccaaaagcttatcattttgtgaatctcatcctgtgtatgctataataccaaatatggcagtagtggtttatttggaagaaagcagaggcatttgttgatttgggctgtaaggcagtccggaggaaggagcgggggatcagaatgaagataaagcaaaggtataatttttacagaaacagcaggatagccaaccagatccttggggttgtgacagtgatctgtgttttacagatgctggttgaatttgataaagaaatcaaaaattatgtttctggaaaaaaggggatttatatgcgctactccgatgatttcctcattgtaatgccttatacgacggatgaccaagttcaggaatatatcgattttattttttcctatgtcaaatcaatgaacggattaattaatttgcagaaagataaaacctcctgctatatctatgaagaggaaaaagtgtatgactatcctagtggtcaacgatcgttaataaattatttgggatttctatttgacgggaagaatgctaggatacgtccccgtgccattaccaaatattattacagaatgcgtcgaaaagcacatacaattgggcgaaataattggatgtcatcgaaagggaaacatatttcggcaaaagtactttatagtatctattcaaaaggtgagcacagacagacatttatcgactatgcaaagaaagcgaatgatgtattaaaactcaatgatcaggagtcacaggctcttattaagaatcacaagagaaaaattgcccaggcaattaaagaaggtcagaacagaaaaaagaaaaactcttgatgcactactatgtactatgagcttgcacttctgcactcctagttatatttcaccaagttgcttgaagaacatccagaaattcatcaaagcatattatattaagacataatagaaaaaattagtatttcttagcagaatgtggtaaaatgaaaaaagagtattttattggtgtaaaattttgttgaaataaagaaagggcaccattatggataaacaggagacacttttccaggagtttattcggaataactattttgacgcggaggctttcttccagtctgtggcaataccggatgcaccatactatttgtattttggagacatgcagagcaatctgtattatatttctgataatatgagggatgactttgattttcctaataatgttgtccaggacttggtaaataagtggggagacaggattaaggatccccaggacaaagcgttgtattaccaggatctggagagcattttttcgcagaagaaggggattcacagtctccgctaccggatcacggacaaggatgggaattctacctgggttcactgccggggaattgtcaggtggtctcaggataagaaaaaacccttatttttttccgggtgtgtatcacgtctggagagtaatttttcccttgatgtggccaccggatttctcagggaacaaggagccctcaacgagctggctggtttgtgggcaaaagatgcacagtcccacattgtgggatttggcctgaatcattttacctatattaatgaatccagaggacgggcagtgggagaccagcttcttaagagtgtttccaattctcttctggaggagcttggggacaggtattccttttaccggctggacgggatgcgctttatggccatttctaaaaatggctgtgcgtgtgaggacggagaggctgttgccaaaatccgggtaattattgagagctgttatcaggcccatggggtgtccagaaaacaggcagcagctttcggtgttctgcatttcccagaagatgggaagattccccaggagattctggagaataccatgacgcttattaatattgccagaatgaatccggatctggagtacagccagttttccaagaatgtgatcgccaggcagagggataagtccaagatggtactgggacttagcgaaagtgtggaaaagggctatgagaacttccgcattgtcgtgcagccgatcgtttccagggataccggtaaaattatcggaggagagacgctgcttcggtggacctataagggacaggatgtgtcaccctctgtatttatccctttgctggaggagacgaaattaattcttacagtggggaagtggattttcctgcaggcggttcaaatatgcagaaggattgtggaggttcagccggattttcttttgtcctttaatgtgagttatctgcaggtgctggatgacaccttcctgccttttatgaaggagaccttgaaggcagccgggatttccggaaagcatttaatgctggagcttacggagacgcattttgatgagatgccccaaagacttcatgagtttgtgaaggagtgccaggagctggggatcaagtttgccctggatgactttggaaatgggttttcttctcttcagatgctgctgaagtatccggtggatgtgatcaagctggaccgtacgctgatgaatgagattgcccattccagagagaatctggattttatcatgagtattgtctatgcctgccaccgttcagaaaagcaggtgtgcgtggagggtgtggagactgattcagagcttacgatcgtacgggagacagattgtgatatgatccagggcttttattattatagacccttggagcttcaggatttgttggggaggatttataccaaggagaatgaatagggcgggttatgtgagtgggctgctgcaccagagattgaaaaatcaatggtgtgacagcccgttgtcttgacttgcactatattttttatgacataggaaagttcttagaactttcctatgtcataaaaaccctccgggggatgcacacaatgtgccagggaaagctgcttcgcagctgcacattggcgcacaaagctaccaagcccctcatgagtgaggggatggggagttgaagcgggcttgtccgctttgttcaaagaaaattaatgataaacgataaaatattattgacattcatagtatttccttgtatgataaaagtatagagaaaagaagtcgtttacacaaggatgcaaggagggaaatttatggagaagagtattgttgaaccgagaattgcctgtgagaagagtgccaaattggtgaaaataggtataggggccattcttttattgatggcagcgatcgtggtgcttgtacttcttgtgaattttggagttataaaaatgaattatcgttatgagaatgacatgtaccgtttctattatggcagctctggtgatttgcagtctaactttgaaggttattggggattaagtaaagaagtgtcaaatcccattcttgcctataatatgttcatgcttgtatatggttttggaatccagatcccggtactcttaattttactttttgtcaataggattatgggccgtattatgagaggggaatctccttttacttatgaaacggaacaggatttgcgcagaatgtctcttgttctcatactggcaggagtatttgccttttcactaatgaggtatattgtgggggcagctgtatttaatacagttgttcttactcccaaggttaattggactatggtgcttattggagtgctgttgttgattttggcggaggtattccgctacggatgccagcttcaggaagaagtggatcacaccatttgatttcattcaggagtcagtagagtggtagaaaggtacaagaaagaaactggtgcatcaatgaaggaaattggtattggactgtagaaaaaagtgcagagctgtgggaaccatttggatgatacaggtacacagcttgataggatggtgaaaaatgtggcgattattttaagactggaccgtgtgatggctgaccgaaaaatctcattaaatgagctggcacagcgtgtagggatcaccaatgttaatctttcaaatctcaagactggaaaagtgcgggcgatccgtttctccactttagatgctatctgccgggagctttgctgtcagccaggagatatcctggaatataggcaagatcccacagaggagacaaaaacaacataggagagccctgaattttccttatccatttggttttgtctaccctataggatcagatacagccgtgttttttattctaaaaaggacagatcaatctcaccgtcaaacaccgttgcagcggggcctgtcatatacacaagattggccttctggtcccattggatctgcagatcgccccccaggagcttcactgtcaccggcgcggacgggtccaccaggttatttaaaatagaagccacagccacagcacaggcccctgtgccgcaggccatagtctctgcgctgccgcgctcccacacacgcatctgtactgtatgagagtccaaaaccttaacaaattccgtattcactctcttggggaacatgggatggttttcaaatttcggtcccagcttctcaatttccagactgttcaggtcgtccacatacagcaccgcatgagggtttcccatggacacgcctgtgatgtggtagatttctccatccacctcaatgggggcgttgatcacctgctccttcggactgctgatggggatttccctggcagttaaaatgggagcgcccatgtttacccgcacagaagacaccttattatccgcacccagggtgagatccaggtatttgatcccacttttggtggagatacggatgctggttttatccacaatgccgtagtcataggcatattttgccacgcagcggatgccattgccgcacatgggactgggggtgccgtccatgttgtacatatccatctcacagtctgctgtctgggagggcttaataaggatcagtccgtctgagccgatgccgaaatgccggtcgctgacaaagcgggcaacggcgcaggggttgggcacgctttctttaaagcagtttacatatacataatcatttccaattccatgcattttcgtgaatttcatttatgttcgttctccttattcattactgtaaaatgatagattgacaggtgcgcaggcgccatggcctggagggtatcatgaaatgggccggctgggtatgccttgaaaagcacatcagcccatcacctgtcaggattcttttaaaagcttgagaagttcagggaagggctccaggcttctggacaggattcctgtcacataggcgatgaggatgccatagttggtaatggccaccttctggtcgcaggcacaggcaatgcggtatttcatctcccgctcattgagcatgcagccgccgcagtggaccaccagcttatagggggtcaggtcatcgggaaattctgtgccggaggtaaatttaaattccggctgtgctttggtgaagtcccggatccagttggggattttgtgggtgccgatgtcatcacactggcggtgatgggtacagccctcggcgatgagcaccttgtccccgtccttcaggtcattgagagcagccactccccggacggcagtctccagatcgcctttatacctggcaaataaaatggagaaggaggtgagggtgagctccttgggtgtatctttggatacccgggcaaatacctggctgtcggtgatcaccagctttggcaggatgcctttttccagaagattttccagggaggccttcagttctgtatcccgcaccactacggacaatgcccccgcctccagcacatcccggatggtctgctgctggggcaggatcaggcggcccttgggtgctgccttgtcgatgggtaccaccaggatcacaaggtcaaggggggcgatcaggtctgccacaatgggatacttatgggtatcctggggcttcagggcagcgatccgctccttgagtgcataaatattcgttttctttgcggcgctcacccagatctcctcctgagagggacgaagggcgtcctgctctgtgggggagagctggtccagcttattgtaaaccaccaggtaggggatgcccttttggataaagcgggcaatgcaggcctcatcttccttggttttccccacaactccgtccaccaccaggacggcgatgtctgtcttgttcagcacctgatagcttttctttacacgcagggcgcccagctctcccgtatcatcaattccgggagtatcgatgaccatcacgggacctaaggggagcagctccatggtcttatagaccgggtccgtggtagtgcccttcacatcagagacgatggccaggtcctggcctgtgacagcgttgataatactggattttcccgcattccttttgccgaaaaatccaatgtgcacccgctctgcggcgggagtctgattcatactcatagggcagcctcttttctgttctcaaaagaaaaaaacggatttccacaaataggaaaggaaaaaaccgctttttcgtcattgtgttttttataattatagaaagaaatttattattatgcaagtatactcttgctttttttaaaaaagatgataaaattaggaatcagacaaggcgcttatggccagaaaaattaccctgccttcgtacgaaaataaaagaggcagaggtttacaggatggaagctccatgggaaaataattgaggaggatattacaatgaaaaacatgaaaaaatttgcagcacttgcgctgacagcagtgatggttgtatctatgacagcaccggtatttgcagagggtgagatcacatccaaggatgacctgaatggtaaggtgatcggtgtacagcttggcaccaccggagacatcgaggcatcgaaagaagagtacggcgctgaagtaaaacgctacaataaaggcagcgaggctgttatggccttaaaggcaggacagattgactgtgtgatcattgactctcagccggctaagaagtttgtggagaagaatgatgacctgaagatcctggaagaagagtttgtggaagagaaatatgccatctgcatgaaaaaaggcaacaccgagcttgcagaagcctttaatggcgctttgaaagagctggaggaagagggaatactggacagcatcatgtccaactacatcggcgaggatgcaggcaagagcccctatgaatctccggaagatgtggaatatcccaacggaaaattagtaatggcaacaaacgcagagtttgagccctatgaatatcatgaaggttctgatattgtaggaattgaccctgacatagcaaaagcgatctgtgacaagctgggttatgagctggaaattgcggacatggaattcgactccatcattcctgccgttcagtctggaaaagcagacttcggcgctgccggaatgacagttaccgaggaacgtctggagaacgtagagttcacggacacctacgcaaatgcaagccaggttatcatcgttaagaaataagaaagccaaaaagtatagaaggctgttgacactttgccaacagcctttttgccagccgcttgggggatgtgtgcagagcattccgtaaagcaaaagaaaaggagtaggagaaaaagtgtcaaatatagcagaagctttttataagaatttaatttctgacggcaagggcatgtggctgctggaaggacttcgaaataccttgatcatcacccttctggccgtgatcttaggcgtggtgatcggttttttggtggccatcatccggtctgcccatgacaaatccggttcatttaagttcctcaatgccatctgtaaaatttacctgactgtgatcagaggaactcccaccatgatccagttgttgatcatgaacttcgtaatcctggctccctggaacgtgaatcccatattggtaggttccctggcttttggaatcaactccggggcttacgtggcagagattgtccgctcagggatcatgtccattgatgcagggcagacagaggcaggaagaagcctgggcctgaattttaaccagaccatgcggctgatcatcatgcctcaggcatttaaaaacgtacttcccgcactggtaaatgaaatgatcgtgctgctgaaggagacctccattatcggatacattggcatgatggacctgaccaagggggccatgctcatccagagccgtacctacaatgccttctggccgctgatggctgccgctgtgatctatctgctgatggttaccattcttacattcttcatgaacaagctggagaggaggctgcgtacaagtgatcgataaaggaaaagttctaatacaggtccaggggctggagaagcactttgggaaaagtaatgttctggacggaatcactacagatatctgccagggggaggtggtggccgtgatcggtccctccggttccggaaaatctaccttcctgcgttccttgaaccttctggaggtgcccactgggggcaagatcctctttgaaggaacagatattacagatccccaggtggatattaacaagcaccgtcagaaaatcggaatggtgttccagcagtttaatctttttcctcacaagacggtgaaggaaaacatcatgctggccccagtgaccttaaagctgatgagtccccaggaggcctcaaaaagagcagacgagcttctggtgcgggtggggctgccggaaaaggcagacgcctatccagagatgctctctggcgggcagaagcagagaatcgccattgcacgggccatggcaatgaatccggatgtgatgctctttgatgaacccacctcggccctggatccagagatggtgggagaggttctggagattatgcgggagctggccacagacggcatgaccatggtggtggtaacccatgagatgggctttgccagggaagtggccaccagagtgatgttcattgacgggggaaagatccaggaggagaacaatcccaaggatttctttgaaaatccccaaaatcccagattaaaagaatttttgtctaaggtactttaaatagcggcacattggaaaagagggcagccctgctgggggctgccctcttgtgcgtctcatcttataattcagcgaatcggttatagcaatatttaatgatctccttacgggtaatgaggccgatgaaggcctgctggtcgtccaccacagggacatagttctgattgatggcacggtcgatcaagtcttccattttggaatctgcgtgaacgggcttgtagttggagcggcgggggatggaaagaatgggaatggattcagcatccttcatatttccgatgccccggttcttcatgccccacaaaaggtcaccttcagagatggtccccacatatcttccgtccctgctgagcatggggatacaggagtacctgcggtgttccatcttctctaaagcctggcgcagagtttcatcctcgtaaatataggccacttcaattttgggggttaagaaaaataatatattcacaaaactgtacctcgtatttctcttaaaatttcacttcaatctcatgatagtatgcattctccagactgtcaataagaggaattataaaattttcagaaactgaagaggccttgaaatttacagtaactgaaggccgatggcctttgcttcctcaaggatatcttggggccaaagggacacgtgaacctccccaatatgggccttgcgcaggaaaaacatacagattcgtgactggccgataccgccgccgatggtataaggaagctctctgctaagaacagccttctgaaaatccagatctctgcggtcgtcgcagcctgcaagggagagctgatggtccagagatttttcatccacgcggattcccatggaggacagctccagggcaatgtccaggaccggatagtacaccaggatatctccatttaattcccagtcgtcatagtctggggcacggccgtcatgaggttctccgttggacagggtcttgccgatctgcatcaggaacacagccccgtgctttttggcaattttgtattctctctccttgggggtgcagtcaggatacatgttcaccagctcctgggaggtgacaaaggcgatctctcttggaaggatctcttctatataatcgtattgtacagccatatacttttctgtttttctcaaaacactgtagatggcacgcacagtgcggatcagggtgtccatgttccgctcttccttggaaatgattttttcccagtcccactgatccacgtaaacggagtggatgttgtccaggtcctcatctctccggatggcgatcatatccgtgtacaggccttctccctgggaaaacccgtattttttcagggcgtaacgtttccatttggccagtgaatgaacaatttccgcatttcccccctggtccttaatgtcaaagctcaccgggcgttccacaccatttaaattatcattcagtccagattccggggatacgaatacaggagcggatacacggagaagattcagcttctgggccagtgtctgttgaaaaaagtctttgacggttttaattgctacctgagtgtcgtgaaggttcaggtctgcatggtagttctcaggaatgttcagttgtcccatggaaagtcctccttttattaaaattgaaataagataacggtataaatatatgcaaatacctgttgaaaaaaacaactgccttccattataacagacaatttcccgattggcaattttcccttgaaagattttcgcaaaaaagatacaatagagttacttctcacaggtagtatcctgtacagataaaggaggcaaaggcatgaaaggaaatcgatgctgcatttgtgacgggcccattgtaaacgggcgttgtaaactgtgcggaatgccctatcagaaaaacgaagagctgtatcatgtgaatgaacaacgggaagtacatatgtctcatgccagccaggcagccagagagactttgcgcaagatggagattcctcttggagatgagccagaaagcaccgcttctgcgtcaaacagccaggtgcgacacaaccggggcgattcctcccaaagcaggaacaaccggggcgattccttccaaaaccacagcaatgacggcagcctcaaggaaaaacgttcagagttcaaaagttctgctgtcatacagaaagggaaatcggtacataattccaatacctttgacagaaattcctttaacggtgcggacaccaaagattgggccaagggtaaggcttattcccagatgtatggaacttccgggaagaagagcagcagaaaaaatagaatgttgttggcggtaatagttattattctgctggtcgcagtggtgaacattttgtctctgtggttatctctggacaggaagggcagaagcttgttggaagagctgcatctgtcggagccatcctacagctatgagagctttaactttaccagtacctcagacaataaggctatgccagccgggggtgaggcctgggagcaggagctggcccctggcttatatacggtaggctgtcagcttccccagggaacctatgacatatggacagacagtgaatatggttccagccttactttggaagaggacggcaactatgaatatgtggcatttacacagagacctgaacaagactatgagacggacaagctgacagacagagagctttttgcaggcaccatcctggacattcaggatgggaccctgcgtttttccacagaaaacgggcaggtggatgccatgaagaaaccgttaaagaatgaaaatacccaaaagaaggtcctgaagaaggtgaagcaggaggatgtctatactgcaggagaggactttgagcccggctggtatgatatgagctgcaattctgtggacggttatataggtctggccattgagcaatattatggagaggactatgaccagcgttatttcactttaaacagctatcttattgaggaaggcaatacttaccgcaatttgtatctgaaggaaggagaccggatcatcgtttcttttttgcatgatacagatactttggaactgattccgtgtgaagagatctatgcagaacggattgaaaaggagtaagaaagttcaaggggaaccaggaagggtttctataacaatcgagagttttataaaaccctgggagccttagtgctcccaattgctttgcaagatcagtgaagatagagcttgctgagggaatccaggaaaaatatgaaaagtgctcttttcttttccggagacatgtgctatactgcctatgaacactaaatatggtaaaaataagaaaaaagattgtgaaatcgtacaagatgtagtaaataggagcgagttcgtatgatttatgtgattaagaaggacgggacaaaggaagagtttaatacccagaagatcgtggcagcggtgaacaaatctgccgccagaattttatatgaattctcccaggaggagaaggatttcatctgtaagtttgcccaggagagggcagtatccctggggaaaacggaaattccgatccaggatatgcacaacattgtagagggcgccctggagcgggtgaatcccgctgttgccaagagctaccgggattaccggaactataagctggatttcatccacatgatggatgatgtgtatacaaaaagccaggccatccgctatattggggacaagagcaatgctaacacagacagtgctttagttgccaccaagcgcagcctgatcttcaatgagctgaacaaggagctgtaccggaagttttttatgaaccggaacgagcttcaggcctgcaaggacggttatatttatatccatgaccagtcagccaggctggataccatgaactgctgtctgtttgatgtggaaaatgtgctcaggggcggctttgagatggggaatgtgtggtacaatgagcctaagaccctggacacggcctttgacgtgatgggagatattatcctgagcaccgctgcccagcagtatggcggttttaccgtgccggaggtggataagatcctggctccctatgcccagaaaagctatgacaagtatgtgaaggaattcctgaaatattcagatgcgtcctggaagggacgggaggaaaaagccattgaatatgccctggacaaggtgagaagagattttgaccagggatggcaggggattgagtataagctgaataccgtgggctcctccagaggggattatccttttgtgacagtgacaatgggcctgggaacgaaaccctttgaaaaaatgtgcaacatctctcttctggaggtccacaagggcggccagggacgagaagggcacaagaagcctgtgctctttccaaagattgtctttctctatgacaaggccatccacggcccagggaaatgctgtgaggatgtgtttgaggcaggggtggactgctctgccaggaccatgtatccggactggctgtccatgagcggaaacggctatatctcaagtatgtataagcgctacggcaaggtgatcagccctatgggctgccgggccttcttaagtccctggtatgagaggggagggatgaacccggcggatgagaacgacaaaccggtgtttgtgggaagattcaatgtgggtgcggtgagtctgcacctgcctatgatcctggcaaaggccagggctgagagcagagatttctatgaggtactggatttttatctggaaatgatccggtccctgcacatccgtacctatgagtatctgggacagatgcgggcttccaccaaccctctggcttactgtgagggcggcttctatggaggaaatttaagacccgatgagaagattggaaaaatcctgaagcctatgaccgcctcctttggtatcacggctttaaatgagcttcaggagctgtacaatggcaagtccatccgggaggacggacagtttgccctggaggtgcttaaatacatcaatgacaaggtaaatcagtttaagcaggaggacggatacttatatgccatttacggtacccctgcggagagtctgtgcggccttcaggtggaacagttccgaaagaaatacggtattgtaaagggcgtctccgaccggccttatgtgagcaacagcttccactgccatgtgacagaggatgtgactcccatagagaaacaggacctggagggcagattctgggagttctgtaatgggggaaagattcagtatgtgagataccccattgattataatatagaagctgtgcgcaccttgatccgcagagccatggagctgggatactatgagggtgtgaacctgtccctggcctactgtgatgactgcggccaccaggagctggatatggacgtgtgtccggtgtgtggttccaagaaccttacgaaaatcgacagaatgaacggatatttgtcttacagccgggttcacggggatacccgcctcaatgatgccaaaatggcagagatcgcagagagaaaatccatgtaacacgcttggtcttttcatttatatagagagttgcttaaagcaacgaaaaagagaaccggcttcccaggctggttctctttttcgtcttcttactacatattcaaaaatgttccccaaggcggaattctttctcacggtttgggcaattgaaaattattctgtacgcagtgccacaaccgggtccttcttggcagccacgctggaggggatcaggccggcgatgaaggtgaggatcatgctgatgagcaccaggatcagacctccctgccagggcaggcgtgcactcaggttcataatgccggtcaggttgtggatgatggcggtgatagggatgttgatcagcaccgagacgccgattccgatcagtcctgcagtgaggcccaccagcagggtttccgcattaaatacatgggagatgtcccttttggaggctccgatggagcgcaggataccgatctctcttgtcctttccagcacggaaatataggtgatgatcccgatcataatagaggataccaccagggaaatggctacaaaggcgatgagtacataggaaatgccgctgataatgtctgtgatggaggacatgagcagggccacataatctgtatacaggatctggtcttcctctgcagctttctcgttgtagtctgcaataatgtcagagatctcatccttgtcggagaaggtggaggcatagatgttgatggtgctgggactgtccgcctctacaaagcccaaggccttatagttgtcctccagggtggactccgatactgtagggggcatgaattcctggtacatgagcacatattgttcctgggtccagggggtggtgtccagcagtcctgccagctggtcctgggacatggcggaaagctgctgggtggtctgctgggcatactgttccttggcagattcccggatggtcatctcaatggcatcaaagagctcttcatcggaaagacctgcaatgtagcttgccacagtatccgggtccacgcccatttcctgggcgtattcgctttctgcctgggcttcgatatcctcccgggtcattccttccatggctttggccacagccgcatccagataggcagaatcaggctgcgccataatataggagcagatttcagcttttttggcattgtcaatggtttttaaatattcctggaaatcagctgccttttcttcctgcgtgggctcctccatgtcatctgtggcaaagggaaggccagtgaagatatcaacggtttcgtcctccatctgcttctggatgatagggctcttctgggtttcttccatcacatacttggtgagggcgttggtgtagccaatggagccggtgagcatggaggctgtggcattttcgttggggcggatgatccctgcaattttcagaggaacgccgaaatcgtcagagttcattaggtactccagcccggtgtcggtggtactcaggtccgtataggttccggtggattcattgtactgccagcactgggaaggaagtacaagcttgaattccttgtcgcagatctcctggaaggtccaggattcctggcccacgtcttcaatggtctcaccgttcatggcggccttggcgatctccggaagggagtcagtatttttaaagccaagagagtacaggaccatatcggagatctcattgttggcatttacaatgagtaccacctcgttgtaggattctggccaggagccatagatcaggtcatactgctgggtgagcagactgctgatgggagagtcttctcccgggagcatttcctgcatgagctgtacctctcccagcatggagtaccgggacatgaaattggcctgggattcgtctgctccgatggcggaggtcatcagctccatgaaatcacttttcatgatcttgccgtctgcgtctgtggtatacaagggcagattcaggttataggagtactgaatggcagaggcatattttttcatgtccgggtcctgctccagaaattcccggaacttcttcaggttgttggtggcagtgctggaggtattcatggcattgagcatgtcatacatgatggtgttggaatacaccttctttgggtccttggtttttccctcttccatggcctctgtgtgcatgtccatgaaggaagccatgagggaggaagtatcctgagtctctgcctcaatggtgatgggataggaggagagggtatcctcctggacctgattaatgtaggtgttgatcccgtgggacagtgacaatatgagggcaatgccgatgattccgatagatcccgcaaatgcagtcataaaggtacgcccctttttggtgagcaggttgtttaaggagagggaaaaggcggtgccaaaggacatggacacccgctttgtcttcttctggacaggggcaggttcctggtccgggtagtagggacgggagtcatcagtgaggcgtccgtccttcatgcgcacaatacgggtggcataggtctgggccagctccggattgtgggtgaccatgatcaccagcttatcctgggagatttttttcaggatgtccatgacctggacactggtctcggaatccagggctccggtgggttcgtctgccaggaggatatccgggtcgtttaccagggcccgggcgatggccacacgctgcatctggccgccggacatttggttgggctttttgtccatctggtcacccaggccgactttttccagggcttccctggcccgctgtctgcgctgggacttggaaacgccggagatggtaagggccagctccacgttggccagcacagtctgatgggggatcaggttatagctctggaaaacaaagccgatggaatggtttcggtaggcatcccagtcccggtcagcaaattgttttgtggaggtgccgttgatgatcaaatctccggaggtatattggtccaaacctccgatgatattcagcaatgtggttttgccgcagccggagtgtcccaggatggctacgaattcgctttcccgaaaggcgatgtcgatgccgttcagggcattgatcttggtggtgccggcttgatattctttgaagatattctgaagttccagcatttaatagcttcctttctttaattatttttccaaagtcctacttgataggagatgaaccgttggcggatctggggatcgtccaggggaccggggccaagatccagcaggctcagcatcaactggtttatcaaaaaggacatgagcgcacaggatgcgcagggatagtccatgacccggatctctccggcctgagcccgcctctccaagagctggggaaaccagttgagctgaggctgtaccatagcggcaagtttttccttggagacaaatttacgcacctctttttccttaaagataatcttgaaaatatccatgtggtcttggaggatctggcagaagttgttatacatgccttcaatgacctcctcaaggggtaacgtctgtgcttccagaagcctggagcgctggcggctgtcctccacaatgtgctgaatgtcctctgtgacaagaacctggaaaatttcctgctttccaccgggaaaatagtggtacaatagtccgtccgccagtcccacggcccggttgatggaccgcactggggtgccggcatatccgtttccggcaaagaggactctagcagagtccaggagctttcttttggtctgggcagcctgttcctggcgggcagtggttttttcttcctttgacaagtattcacctgctttcgtttcgttatacaaatgttcaacgaagagcgtatcattcccttttgaagatgtcaatatagtttatgaaaagtttagaattgattgaaaatagatttccagcaaggcaccggagcttacccattgtgggaaggcagggggcaggaggacagcaaaaaaagaccagtccgggaaggggagcgaaatggttggaaattgaatatccaaatccgtagcagcttcccttgaaggactggtcttagttggattgcaggtggttgtaattttatttgctgaaagggcctgggttctttcgtaaaaggacgggggcctgtcttatttgataatggttcccgttttttccagatagccggccttggcgtgggggatgtcagtgataatggtgcgccgtcccgtgcctttggtgataaaggagactccggcctggaatttggggagcatggagcctggtgcgaactggttttcttccatatatttttcggcttcctctacggagataatatccagatactcctcctttgaggtacctctgttcaggctgactttttccacgctggtaaggatgatcaggtcatcggcgtttaattcttctgccatcaggccgctggccaggtctttttcaatgactgcgctggcgccgtggagattgatgccctgctccataacagggatcccgccgccccctgcggcaatgacgatctggtctgcgttcaccagggcccggatggtgtccatttccacaatcttctggggctttggggaagccaggatcctgcggaagctgcctggttccacctctgtgacaaagttgcccttgtcttcttcggcctctgcctcctcctgggtgaggatacggccgatgatcttctccggctctgcgaaggcgtcatcataggggtcaatgactacctgggtgagaaccgtgctcacaggcttgtagatgcctctggaaatcagctcggttcttatggcgttttgcagatcatatccaatataaccctggctcatggcagagcacacagacataggggcaaacgtataatcaggatgagctttaccgaactcgttcatggcggtatgaatcatgcctacctgaggagcgttgctgtgggagatgactacattggcgccctctgcagccaggtctgcgatggccttggccgcttctttggtagcctgcttctgctcaggaagagttgtgcccagggcacggtgtccaagtgctacaacaacggttttttcactcataggaaatacctcgtttctctcttatttatatgaatcgattttgaatagtttcattatagagtttccacagttaaattgcaagagagagatttttctgtgtttgggaaagaggcggcaaacagggcatccgccacatccatgtgtttttcccgggcaatgcccaggatcagccgcttatataccttgcccatgtcccagtggctgggaatagcatatttggcggcggaaacattatcaaaggttccggtggtgattccagctgactggataaaatcgtcactgacacggtcaatattatcgctgtggtatacatctgccaggtcatagattttggcaatggtgcttttgcccagagcgtttaccacatgggatcgtttgtttttcgtttttcttgcaatataatcaatcaggctgcaggtgaaaaaaaggtcattatcttttggggcttctcttcctatcatcgtttgtgcacctcctcgctggatagaaattccagacaatctttttattaatagaatcatatcatatttcttgtgagacgtacataataagccgtaagaactttggaaatacaaagaaacagcccccgctgtcctgcgggggctgtttgctttttgaggggggagatagagagtggttattcatctatccaagacctattataggggagaaatgtgtgcaaagtgtgtctagtttctaaaagaaatcgaaaatttataaagaaaattaaaagaaattatgaccttttgaaaggctattgtatgggggaataaaacatggtaagcttttagatgttatctgctttacctttcatgccattcggcatttattttccaaaatccaaagaaaagcaaaattcaattgtacaagggtgggatgcctatgattgcttctggctgtgacagctaaaaaaatgtatagcctgtgacagtttccaaaatgagaaaaatagagttagaaaaaggagcaaaaagaatatgaagaaaataattgaacgatgctggatattaggtctggccgctgttttggcggctgtatttttcatggccggagaatgggttctgggcgcccagatgccggagatcatgacagaagaggagggagaggcgccgctttggacaaaggtgcaaggagaatctgggcaagagcagcctcttaaccaggaacgatcgccggcagggatgcgaatgaagcaagaggagccaatgaatcaagagaccacaataaatcaggaggagccaataaatcaggaggagccaataaatcaggaggagccaatggatcaagggcagccaatggatcaagagcggccaatgagtcaagagcggccaatgagtcaagagcagctaatggatcaagaggagctaatggctcaagatcaacgggcatcttcttatgaaaacagcctggacgcagacggagatcataccctgtctccgggagaagaggacacctgcggcgctgtcacccaggaaggggaaagcaatgcgggaattgtggaggaagaggaatccaccctttttctggaaaagactgccctgtgggttcaggagaaggaataccgggcggagatctcgctgagagccggcgggtgggccctggaggacacggtccgtctggaggatgtggtttctcccttctggactgtggataaagaacaggcagattcccggatccatgtggaaaaccgcactgcagtggacaaggatggcgcagaaacccagatagaggccctgagttttgtcataagtgaggaggaccagtatgcaggctttgtggaatttaccgttcccataattttgaaggaggagtacagggaggtttcccaggatacctggtatcccaccaactgggatgtgacggggccaaaggaagagaagacctgcggggccaggctcacctacgtggattcctgcaaggaggagcatgtattggaggcagaaagcccccagcttctggtcacaccgggcttagtggattttactgtggagaaaaccgcggaccgtaccttggcaaagcctggagacgtgatcacttattccatcaccatatgtaacacaggtgagcgtaccctgcactctgtgctgagtacggaacggtttctggatgcaggggttcaggcggcttttgtaccccaggagggagtcaccctgagccaggaccggacccaggctctggttcccaagctgggcccaggggaggagatcactctcacggccactgttcagcttccacaatacatcaaccgccccgagctggtgaaccaagtgatcgtggtaacagacgagacaggagccctggaggggaaaacctcccagtcttccattaccctggagctgccggtgacggagacacctgtgcccacaccaagtccctttccttggcccaccgccaccccttggccgatcagtacccctgctcccacagccccggtccattcctatatttctccaacccctgtactctatcagggaaaagctccagattccatttacggaaaaagcgcctcccaggcctccagctcccccaagacaggagatgacacccaggtgtctgtgtatctggctcaaatggtgcttgctctcttcgtcttcctaaaggccagacggcgctttgccggcagggcaggaaacaggagagaagggcggtttttccaaggagagggaaaaaggaaacgttgaaaagcccagaaaggtatgatattctaatatggagtataaataaaattagaagaatctttttctatacaaattggaggcttaaaaaatgaaactgacatccttgttggaaaacttggaatatacctgtgtccagggcagtgtggatgtggaggttcaggatgttgtctatgattccagaaaagccggaccgggctctctgtttatctgtatccgggggtatgtggtggacggtcacaagtttgtgccggatgtgactggaaagggtgtgaaggccctggtcacagaggaacctgtaaaggctccagaagatgtgaccgtgatccaggtaaaggacagccggtatgccatggcatttatttccgccgcctatttcggccatcctgccaaacgcctgaagaccattggaatcactggaaccaagggaaagaccaccaccacctacatggtaaaatccatcctggaaaatgccggacacaaggtggggctcatcggaaccattgagatcatcatcggagacaaagtgatccctgcatccaacactaccccagaatcctacatggtacaggagtattttaaggagatggctgatgcaggctgcgactgtgtggtcatggaggtggcatcacagggactgatgcttcacaggacccagggctttgtgtttgattatggtattttcaccaacattgagccggaccatatcgggcccaatgagcataaggattttgaacattatctccagtgcaaggccatgctgttgaagcagtgcagggttggcattgtgaaccgggatgatgagcattttgaaaagatcatcaaagatcacacctgtaccctggagacctatggattttccccggaggcagatctgagggctgaaaaggcccagcttgtttccggcaagggaaccctggggatccgctatcatctgaaaggacttatggattttcctgtggagattgacattcccggaaagttcagcatctataattctctcaccgccattgccatctgccgccatttccaggtatcccagaaggatattgtggaggcccttaaagtggccagagtaaaaggccgcattgagatggtgaaggtgtctgatgaatttacacttatgattgattatgcccataacgccatggctttggagagcctgcttaccacgctgcgggaatatcatcctcaccgtctggtatgtctctttggctgcggcggtaaccgttcaaagctgcggcggtatgagatgggagaggtgtcgggaaaattggcggatctcaccatcatcacctccgacaatccaagagatgaagatccccaggccatcattgacgacattaagataggaatggcgaaaaccagtggaaactatgtggagatcattgaccggaaggaagctatcgcttatgccatccaccatggagagccgggggatattgtggtcctggccggaaagggacatgaggattaccaggagatcaagggaaagaaatatcccatggatgaaagagtcctcattcaggaaatcctggaagaagacagaagaaatggttgaggaagggattgcatgtatgccaatattattgtagatatttccagtgagaagctggaccggacatttcaatatctggtgccgccccaactggaatctgccctgtccgttggcatgactgtaaccattcctttcggcaagggaaaccgggatcttgcagggtatgtggtgggactcacagacaggccccagttcgacatcgggaagatgaaggttataaaggaaatccgcagcagccaggaaaccgttgaatcccggctcatcgccctggctgcatggatgaaggagcagtacggctctaccatgatccaggcgctgaaaacggttctccctgtgaaggagaaaatggctcccaaaagcaggactgccctggtgctgaaggcagacccggaaaaagccctggaatatctggagacgctgaaaaagaaaaaatataaggccagggtgcgggtcctggaggctttgctcgcccagggaagtctggactatacatctgcctgccgccagcttggatgcaataccagtatgttgaatgcgtttgtgaaggatggtatcattctggtgaaagaggaggaggtcctgcgaaatcccctgaaagaggcagcggttccaagggaaaggaccgggcagcttatggaagcccaaagccaggctgtaaaagctgtgcttgaggagtggaatagggagacgccccggccctgccttctgcggggagtgaccggaagcggaaagaccatggtgtacatggagcttatggagcacattttggcaaaagggcagcaggtgatcctgctgatccccgagatcgccctcacctatcagaccgttcagcggttttataccagatttggagaccgggtatcggtgatcaattcccgtctgtcccagggagagcgctatgaccaattcaaacgggccaagaacggagaggtccagattatgatcggcccccgctcggccctttttactccttttcctgatctggggctgatcatcattgatgaggaacatgagaacacttataaaagtgaacattctcccagataccatgcccgggagactgccatctgcagggcacagatggagaatgccagagtacttctgggttccgccacgccctccctggaggcgtttttccgggctaggaccggagagtatgcgctgtttaccctgagagagcgctatgagcagcggccccttccccaggtggagatcgtggacctgcgcacagagcttcaggcaggaaaccgctcgattttaagcaggcatctggcaaaagcaatggaagagcggctgagccggggggagcagacgatgctgttcttgaaccggaggggctatgcaggctttgtgtcctgccgctcctgcggtcatgtgatgaaatgtccccactgcgatgtgtctctgtcccagcacagagggggacggctggtgtgccactactgcgggtatgaaattccctcggtctcccaatgtccccagtgcggctccccttatatcggtggctttaaggcaggcacccagcagatggaagaggtggtgaaaaaagtctttcccaaggccagagtccttcgcatggactatgacaccaccagaaaaaagggggaatatgaagaaattttatctgcctttggaaacagggaggcagatgtattgatcggtacacagatgatcgtgaagggccatgacttcccgggagttactctggtaggagttttggcggcagatctgtccctgttcggggatgatttccgctgcggcgagcgtaccttccagcttctgtgccaggctgtgggccggtccggccggggcgccagtcccggggaggcggtgatccaaacctaccatccggagcattacagcattgtacgggcggccacacaggattatgaagaattttatgaggaagaaatgtcctaccggcggcttttaaaatatccgcccgctgcccatatgatggcggttctggcttctgcccaggagttggaccgtctggagcaggctatggaatatttgaaaaaattttctctgcgggtctacccccaccaggatctgcagatcatcggtccaggtgaccagtcagtgggaaaaattaacgatctatacagaaaagtactatatttcaaacatcaggatcacggaaaactggtggccatcaaggataagctggaacagtatatcctggcaaatactgggttccagaaaatttatatccagtttgattttagttaataatagataaggagacgaggaaatggcaattagaaaaatcagaacagaaggagatccggtgcttaacaaaaagtgccgtcctgtggaggagatgactccaaggatccagcagctcatcgacgatatgtttgataccatgtatgaggcaatgggcgtgggcctggcagcgcctcaggtgggaatcctgaagcgtattgtggtgattgatgtgggggatgatcccattgtactgatcaatccggagatcattgaaagctccggagaacagacaggagacgaaggctgcctgagcatcccgggaatggccggagaggtgaccaggcctgattatgtaaaggtgcgggccatgaacgaaaacatggagctggtggagctggagggcacagaccttctggccagagctttctgccatgagatcgaccatctggagggcatcatgtacacagagcatgtgatcggagaccttcatcgggtgaactacgatgaggacgaagaagagtagacctgggaaggaaggtagaatatatgaatattgtttttatgggaacaccggatttttccgtgggggccttaagggctttggtggagaatcactacccagtgcggggggttatcacccagccggacaaacccaagggaaggggcaagacgctgtgtccgcctcccgtaaaggaggaggccttaaagcacgggcttcctgtgtatcagcctgtgaaggtgagagatccggaatttttggacatacttaaggggatggagccggacttgatcgtggtggcggcttttggacagatcattcccaaagagatattggagctgccaaggtatgggtgcatcaatatccatgcctccctgctgcctaagtaccggggggcagctcctatccagcaggcggtcattgacggagagaaggaatctggggtgaccattatgaaaatggcccagggcctggataccggggatatgatcgcaaaggttgtggttccgctggacaaagaggagaccggcggaagtctgtttgacaagctcagccaggcaggagcccgtcttcttgtggagaccattccttcgatttttgatggaacggcagtttatgagaagcagcctgaggaaagccccacaccttatgcggccatgatcaccaagcagatggggcttttggattttacaaagccggcctgtgagctggaacgtctggtgcggggactggacccctggcccagcgcttatacctatctggagggtaaaaccctgaaggtgtggaagagctttgtgcttggggacgatgatctccaggaagcagacggatctgggcaggagccgggaactgtggtgaagacagacaagacaggcatttacgtggcctgcggggaagattttctgtgcctgacacaggtccagcttgaggggaagaagaaaatgagtgcagatgcgtttctgcggggctatgagcttgcgccgggaacgaaactgcagcaaaccaaatagtgaaaaaggagtgacgccatgtattatggaagaggactttactggggctttgactggacatatctgctgctgatcctgggtatggtcatttccctgatcgcatctggcagattgaaggccacctttgcctcctacagcaatatccgcagctacagcggacttaccggcgcgcaggcagctcagagaatcttaaacagcgcagggatctacgatgtgcaggtggtgcccatcaagggaagcctcacggaccactatgaccccaggacaaagaaggtgtgtctgtcagagcctatttacagccaaacctcattggctgcggtgggagtggcagcccacgagtgcggccatgcggtacagcatgccagaaattatgggccattgaatctgagaagtgccattgtgcccatcgctaattttggttccaccctgtcctggcccattttcctggccggactgctgatgggaatccctaagctgctcaccttgggcattattcttttttctctggcggtggtgtttcagcttgtgactcttcctgtggaatataatgcctcctccagagctctgaagatgctgggagagacccacattctgggaccggaggaagtggcgggagccagaaaagtactgtcagcggcagcccttacctatgtggcagccctggcttcgtccgttttgcagctgttaagattagtaatactggccggaggaagaagaaaccgtgactaatggaataaatacaagagagatgattttagagatcctgctccaggtggaggaagaggatgtgccctgccacctggcactgcggggggccttgtccaaatatcagttcctgcccaaaagcgacagagcttttatcacccgggtgacagagggtaccctggagtacaggatccagttggattatataattgattatttttcaaaggtaaaggcagacaaaatgaaaccggtgatccgggaaattttaagaagctcggtctaccagttgaaatatatggactctgtgccggacagcgctgtgtgcaatgaggcggtgaagctggcccaaaagagaggcttttataacctgaagccctttgtgaacggggtgctgcgcaccattgccaggcagatggaccaggtggaatatcccaagagggaggaggatctggtgaaatatctgtccatccggtactccatgccggagaacctgacggccagatggatcacttcctttggggaggagaccacagagaagatcctggcagattttctgaaggaaaagcctaccactgtccggtgcagccagtatctgaacaccacccaggacaccatagaaagcttaaaaagtcagggagttacagtgaagcagggcccttatctgccctatgccctggaaatctccggctataaccacatcctcactttggatgcctttatccagggcaggatccaggtccaggatgtaagctccatgctggtgggagaggcggctgaccccaagaagggggactacattatcgacctgtgtgctgctccgggaggtaagaccctccaccttgcagataaaatgggcggctacggcaccgtggacgccagggatgtgtcagaacagaaagtaaatttgatcagagaaaatattgccagaaccaacgccatcaatgtgcaggccaaggttcaggatgcaaccatctttgatgtggattcggaattccaggcggatattgtgctggcggacgttccctgctccggctacggagtcatcgggaaaaagccggatatcaaataccggatgacaccccagaagcaggacgagctgatcatccttcagcggaccattctggaccgggctacacagtatgtgaaaccaagaggcgtgctgatcttcagtacctgcaccattgccaaggaagaaaatgaggagaatatgatgtggatcctgaacaattatccctttaagctggaaagcctggatccagtgctgccccaggagcttcactgtgagtccaccaagctggggtatctgcagcttcttccaggcgtccacaagacggacggcttctttctggcaaaattcaggagaaaataaccatgcgggacacacaaaatgacataaaatccatgacagtggaggaactcaaagctgtgatggataagcttggggaaaagccctttcgggcaggacagatctatggatggctccatgaacgcctggctgcctcctatgaggagatgtccaacctgcccaaagatctgcgcagccggctgcaggaggaatatcctctcacagttttggaaacggtggaggtgcagacttcccgggtggatgggacccagaagtatctgttccggctggaagatggcaatgtgatcgagagcgtcctgatgaaatataagcatggaaattccgtgtgtatttcctctcaggtaggttgtaagatgggctgccgtttctgtgcgtccactttggacggctggaccagaaatctgcttccgtcagagatgctggatcagatctacaggattcaggctatgactggggagagggtgtccaatgtggtcgtcatgggaaccggagagcctctggacaactaccacagcctgctgcggttcattaagatcctcactggagagggcggcttacatatcagccagagaaatgtgacagtatccacctgcggcttagtgccccagatgtatgatctggccaaggaaaagcttcagatcaccctggctttgtctctgcacgcccccacagacaaaaagcggcaggaattgatgcccatcgccaggcggtatagtctggacgagcttatggaagcctgcagaaattatttccaggagacaggcagacggatcacttttgagtacagtctggtggccggggtgaatgacaacaaagaggaggcggcacagcttgtccagcttctcaaaggccttcacggacatgtgaatctgatccctgtgaatccaattaaagaacgctcctatcagcgttctacacaggaagctgtggagaatttcaaaataaaacttgaaaaatgcggaataaatgttactattagaagagaaatgggcagtgatatagatggtgcctgtgggcaactgcgaaagcgatttatggaaaagacagaaagcgagaagtgacatgaagacttattcggttacggacgtgggacagaagaggaaaatgaatcaggactacgtttttgtgtcgaaggagccggtgggcaatctgcccaacctgtttgtggtggctgacggaatgggaggccataatgcaggggattttgcctcttcctatgcggtaaaggtgatgacggaggccatatccaaggatatggattttaatccggtgaaggtgatccggcatgccattgaggcagccaacgaggagatccgtgtgcaggcacagaaggacccggtacttaccggcatgggaactacgatcgttgcggcaacgatcgtagggagatatgcctatgtggcaaatgtgggagacagccggctgtatgtgattgattcaaagattcatcagattaccaaagaccattcgctggtacaggaaatggtgcggatgggagagcttcgggaggaggaagcccgaaaccatccagacaaaaatattattacaagggctttaggcgcagaggagaatgtgaatattgacttttttgatctgtgtttagaagaagggagcgttattttaatgtgctccgacggtctgagtaatatggtggcagatcatgaaatcgaggaaattatcctgaaccctgcggagaatttggaacaaaagggtgagactctggtagcacgagccaacaagaacggcggcaaagacaatatagccgttgtactggtagaaccattcacaaatgaggtggagaaatgttaaagacgggaatgattataggagagcgctacgaaatcgtagggaagattgggaccggcggcatggcggatgtctataaagccaaagatcacaagctgaaccggttcgtggcggcgaaagtcctgaaagcagaatttcgggacgatacaacttttgtccggaaattccggagcgaggcccaggcagcagcgggcctgacccatcccaatattgtcaatgtatttgacgtgggtgaggatgacggtgtgcattatattgttatggaattgatcgaagggattaccctgaaggagtatattaccaaaaagggcaagctttccataaaagaagccaccagcatagccattcaggtttccatggggttggaagccgctcacagtcacggcattgtgcacagggatgtaaaaccacagaatattattatctcaacagacggtaaggtgaaggtgacagatttcggtattgcccgggcggcctcctctaacaccatcagctccaatgtgatgggctctgtccattacagctcaccggaacaggtgcggggcgggtacagtgacgagaagagcgatatctattccttgggtattaccctgtatgaaatggttaccgggaaggtgccttttgacggggataccaccgttgccatcgctatcaagcatctacaggaggagatggttccccccagtatttatacgccggaactgccttacagcctggagcagatcatttataaatgtacacagaagagtgtggaccgcagataccagaaggtggaggaggtcattgctgatctgaagcactcccttattgatccccagggagatttcgtgaagctggagaccatagatacagcggccaagacactggtgatctcagacaatgatctgagcaagatcaagaataactccggcaaggtgaatgtgtccaaggatttccaggacgcccagcctctggagaaggaagtgacagagaacgactatgatgacggggatgacgatttttcggaagtgcgccgtcagcccaaggcaaaacccaagagccgcaagaaacggaaccggaagcaggaaagagccaggagcattgtatttttagtggcaggcattatcgttctggcgatcttgatctatgtgatcggacgggcggcaggtatcttcggagataaagaagaacccgcaccccagacccagcagcagaaccagtctcaggaagacagcgatctggtggaggttcccaacctgttggggcagacagagaaggctgcagctgagatgactcaggcgcttcacattggtgtaaaatgctccggagaagaatattccactttagagaagggcagaatctcttcccaggatcagcttcccggaagccaggtgcagatgtattccaccatcacctacaagatcagcaaaggaatggaggacattaccattccggatctggccggacaggattataacgtaggcctgcaggcccttttggataaaggcctgaatgtaaacgtgcaccgtcagtatgacgagatcgctctggatcaggaaatcctgggtacagagccggcagcgggggagactgtccagacaggcggaaccgtcaccttgctggtcagcgacaatgaggcttataattatgagattcccgatgaactgatcactccccaggcatctcaggacactactcctgaggtgacgccggaagcggggaccacggatgttccggatcagtctctgggaaatacaacgacggacaatacggcagctacaggtacctggatgtgtacccagcagctgaatacccctgagggatatcagggaggcgccatccggctggagctgatccaggatgtgaacggcaccaccaaggcagccaccattattgacggcgagcagctggaattcccctatcagttaaatattgtgggagaaccgggagtgagtcagggtgagatccgggtatctgagctggtgaacggcagttacacagagcttggttattataacgtgtcctttgaggcacagcaatcatagatgcaggaaaatttatgcagggaaagattataaaaggaattgccggattctattacgtgcatgtgaaggatcaggggatatatgaatgcaaagccaagggaatcttccggaaagaaaatcagaagcctctggtgggagacaatgtggagattgaggtcttagatgaaaaggagaagcttggaaatatttccaggcttcttcccagaaagaactcccttatccggcctgcggtggcaaatgtggaccaggccctggtgatctttgcggtggaggaccccaaacccaattacatgcttctggaccgcttcctcataatgatggagcggcaggggatcccggtgaaaatatgttttaacaaaaaagacctggcggcaaaagaggagctgcgctttctatatgagacttacaatagctgcggctatcaggtaatgctcaccagcgccagggaggaagccggcatggaggagtttctggaggctctgcggggaaagaccactgtagtggccggaccctcgggagtggggaagtcttctctcacaaaccggatgcagacagaagtgtgcatggagaccggtgagaccagcaaaaagctgggcagaggaaaacataccacccgccattcccaggtgatccctgtgtgcagggacacatacctggtggatacaccgggtttttcctctctttacctggaaaatatggaaaaagaggaattaaaggaatattttccggaatttagaaaatatcaggaccaatgtagatttcagggatgtgtccacatccatgagccctcctgtgaagtgaaggaagccctgaagcggggagagatcagtgagcagcgttacaaggactatgtgggcctctatgaagaattaaaagagaaaaggagatattaggcagatgtatcgattgtgcccttccattttgtccgcagactttaaccgtctgggcgagcagattaaaattttggagaaaaatggaattgaatggcttcacattgatgttatggacggagattttgtgcccagcatttcttttggaatgccggtgatccgttccatccgcaaggaaagcaagatgttttttgacgtacatttgatggtcactgaaccggaacggtatatccaggattttgtggactgcggcgcagactccatcaccgtgcacgcagaggcctgtgaggatctggagcggaccattgagagaatccgggactgcggcgtgaaggtgggagtttccattaaaccggccacaccggtgaatgatatcagccatcttctccacgatgtggacatggttctgctcatgaccgtacagcctggttttgggggccagaagtatatggatgagtgtacagagaaaattcaggagctccgtgagcttatagacgaggagaatctggacgtagacattcaggtggacggcggcatggaggagaacacccttcccattgccataaaggccggggccaacctgatcgtagccggctcctgggtatttaacggggacattcagaagaatttggaaaaaattaagagacagatgaacgctctgtgcggcatgggagattaatgcatgtttgatacagtgatgatcagcgggggcaatatcgaggatgattttgccctcgattttttggaaaaacataaagaggcccagatcgcagccgctgacgggggcctgtatttctgtaaaagaaacgggatccttccctctgtggtcatgggagattttgacagtgtcccaggggaactggtagactattatgaggaaaaagaagaggtggaggtgatccgcctgtcgccggagaaggacgatgcggacacacagagcctttttaaacttctcatggaccggggagtaaagcaggtggctattttaggcggcacaggaacccggctggaccatgtatttgccaatctggagcttttagcctacgccaaggcaaacggcgtggaggcagtgctttatgatccctgcaaccggatctctgtgattgaaagcggcactgtggtgaaaaaatcagagcagtttggaaagtatatatcctttttccctctgggaagcgacgtgcagggacttaccttaaaaggcttccagtatccactcactgattattacctgcgggctgtggacggggggcttactgtgagcaacgagatcgcagaggaggaagcgcagattacctttgattcggggattctgcttatgatgatgacgaaagactgactaaccgctggttcctgcccgttgtgtggtcaggaacatcctgatgcatgggcagaaaggaagattttaggccgttatttttcggcaattacagatttttcaacatggcagaaaaaagtagtacgatgttttatagataaaagcgtgaacctttcggtgaaagctggtgattttggagatgtattttctcccaggatcaccagctttttgttgcgtaaaaaggttctccgaacttttttatgtaacaaaagtctcccagggttacacagaatgtgcccaggaaagctggttcgcaggtgcacattggcgtacaaagctgccaggcttctcatgagtgaagggatggggagttgaagcggatctgtacgcttcgttatgtatgggtataaaatgtacatcttaatttgatgaaaatagtattgaattgatacgataattcaaaaaaagaaaaataaacatggcaatgtttcaaaaagataccaaaaaattattgaatgaattgaaaaaattatctaaatgaattaatataaaaacatcaaaaggcaaacgggaagataaggatgaataccaggaagaaaatgttttaaaataaaacaataaaactttcccggaagctttaggccgtgcacgggctggaaacaatacagaagatattaggaggatacaatatggcaaggaataggaaaaaaacggtaataggacttgcagcgctggtatgtattactgcggggtctagtatattcagcgtaaacgcgtttgcaaaagacgcagaattggaaatccagagcctgccagaggttccggaaaactattctgaaatagtggataagacgaataccctaaaaactgttttcagcggagcgtatcgtgtgccggtgacagtgacagagacagaagagcggtctgtattggtttatcttgcggaagactatgcgcagacccagggcttctttatggtaattccggattctggcatgacggcggaggatgtactggttgatggagggtggaaaaatctggcggatgaaaaggggctgttcttgatgattcttgagccagactcggagtacgatatcggcaaagaaggacgagattatgcgtatgtaaaggcggcggcagatttggctggttcccgggattattggtttatgcccaagggccgtgattatatggctggatatggagatggcgcttccctggcgattgagtatgcacaagacaatgcggcaggctgggcaggcgtggctgcttttggagacatgaaaatccatgccgaagatattagtaatgcagaaaatgagcttccagtgtggatgtatgtgtcagatcgggatgcggtttctgatctcacagaaaaatttaaggatttaaatgactgtaccgatgaggtttattccagtgctgatgcggatgagatctatatgcccaatcaggcagtgaacgatctattgctgaacgaccagcctatgtcccaggttcgtgtaactgttgcagaagagccggaggcattgaatccggacaggactgcggccgtttactcattcctgaaaaaaggaacaagagaggtgggctacggtacaaaggcaatgcgttatgcccatgatctggaagattggggagcgcagatcaagagtttggaaatagatgggattactcgtttctggattgagtatgttcctgaaaacttgagaaatacttcgaaagagggtgctccattgatgcttgttctccatggatcggctcttaacggggagtattttgcagaacgctctggcatcattcgtctggcagaggaaaatggatttattgttgcattgcccactggaagcatcagtaatgccatcagtcctgtgtggaacaccagcgcctcagaagagaactgggatgatgttggattcatcaaatccatgattgaagatatagagaatcggctgccggtggatcagtcccgggtatactgctatggacattccctgggcggaatgtttacacagcttctggcaagttatttggatggtacctttgcggcgatcagcggaaccggatgtgcaagcagggcgattcaggatgttgcagaaggacttactcatgagcataagacgccagtatatgtgcttatgggagagagggatatgtgggatgcatcttttgagacagaggatgcggaattttttagaaagtattttacaaaatataacgacacttcagaggaatatggttcttatcgcagcggacgttatcagatgtatgagtggacggacgaacaaggtgtgcccatggtaagatacggtattgtggatgatatgccccatacagctaccctggacaaccttatggagttatatggctggatgagcagatttacccgcaatgaggatggcacggtgggatacgaaaccggtatttatgcagaataataaaataatgtaaaaaacgggaggaagcaaaatgaagttaaggaaggtatttactttatccgcacttactctggcactttctatgttggtgcctgcagctacagtgttggcagaaaacagttacacagacgaggagctgaccgctaaatttgatgaggaaatgcatgaggcccgctatatctgcagcagaggagctgcgtatgagtatgaaggtttccagaagtatgtcagctattggttccagaaagcgtggagtgtgaccgataaggcgcagacgcctatcacagaagtggaaaatggagcagagattgtagatactctggaggagcttcgcacaggattggttcagattgtggatgatccagaagaaatctgctggtatatctgggataaggatatgcctgaggcagaggaggcagatcaatacgattataccatgacttatgatgaggaaggttttgtaccgtttttagtaccttatctcctggaagatcaaagccaggttaagggaaatatgatcattgtggcaggcggaggctttaatcagcgatgcaatgacggcgagggtgactgtgtggcagtatattggaatgagaagggttataattgctatgtgcttcagcgccgtgtggctccatcagaggagattgacagttctctggatttacagagagccatccgttacattcgctatcatgcagaagaaaagggcattgcaaaggcggatacaattattgccacgggattttccggaggcggaatgacaattatgaatcagttgaatacttgctatggtgacatgactccggatgtggtatataaagactatcagtgtgatgagattgatgccgtgaattctgattatcaggtagctgtgatcatgtacggcgtacaagaagggtacgactctgagaatcccaatatgcctgcgttatttatctttggaggcgaaattgataataaggttcctccgcaggcaccggtatctctgtatctgaaagctttggagaaggggtggaaagctgagctgtatatggcgggcggatctcaccatggcattgggattagcggagtgcgcgcattctccaatgtaggatatacgaacgcagcgctgtatcctgcacttttagatacctatctggacgttcagctgggatataagagtgagactttcacaccgtgcggctgtgttcctgtgtgcaagtgcgaaggctgctgtgatggctccttggaacctcctgttaactgtgagtgccagtgctgcgtggagtagccgggaaatagaagaaaaacaggaatgccaataggaaataaagaaaaaccttggacacagcccaaaagtgtccaaggtttttggttcattatagtaacaaccctccgcagggggttattcctttaaataccgccatagggtggaacggccgattcccagcttttttgctgctgcagtctggtttcctttggtttcctccagaaccagctttacaacgtctcttgtgatctcgctgagtgtctggtttaaattcaggtcatgttgacagcctttggccagaggggtgcttgcccctgataatgcctgttctttttccaggagcttagccacgtgttctgcctgtatgtaaggggtggtggtcaccagagcaagctcattgataattcgccggaactgtgtgtaattgaatggccagctataatcttgcaggagcttcagtgcctctggctgcagcccgataatttggttcaccatggatacattgatgctgttcaggcagaggctgcacagtgcggggatttcctctggacggctccgaagaggcggcagatgaatggtcaggcaggataaccggtttacgaattccatggcttccggtggtacgccttcacctgtaggaagattacaggaaaaaagcagacggttccgtttatagaggttcgtatcaatgatgatagagagcaggtgctgtcgccggtcagcagataaagcggtaatatccttcaggtaaatggtattgttattatcattaaatggagaattataatgcttggtgagaaaaatccagctcctgtcattgataagcgggcagtttatggtaatgagcgggttggcgcacagggagctcctggaatagatcatgcgcactaagtgatcctttccggaaccgttttctcctgtgagcatcactggaaaattggtgtgattaatattttcaatagtggtgcgcatgtcgtcagtggtatcggcaatgctgtaaaagctgttaaaaaattgattctccgtatcctgaagattggaatactggattccgtatttgctagtagcaaagggaaccgaggttgcggaaaagtagaacgcgccatactcctcacgaagaaaggtcattgccttgcaggtgaaggagaaaagtgttccatccaaatttttaaagaatttatggttctttttgctcaggacagcgggcagctcatggcaaagcgtttcatggagtgaggggaagttcttctcgtcaatagtggtgaagaaaacctcgccgtcttgtttcagtaccacgatttggtcatttcctcctcgcagaatatctgcatagaactttttttcttctttaatattggtgtaactggaacacagccggacggcctggtcgaatgctttggaaatgctctcctgaccggaggtgatcaggatcgtattcagccccagacgctttgctgttgtgttggagatcatgtcgcacagaaccatccggtaacccttttcctttaaccgacggagagtttcctgtgcctcatcctgatggttgatggtgaaaatatcaattttatattggagaagatcacaaataagtttggcattgcccgtaataccgggaaagcccacgatcgcatattggtcggtataattttctgccagtttgatggcacgcaggatgtcatagacagagagacccacctcgatgacggggatatgggtgatctggccgataagctgggcagtacctccccgggacatgataacatcatagtcactgcgaaaattgtggcgggcgatttcaacaccttgctgtaaatctccggtgaagacgtcaagctgtatgtcagaccgctctgcggccagtttctgcatgatagttttcataccatcgtagggtgcgattccgagaattcgaacaactgtggaggctgtctgggcagtttcttcattcataataaaatcctccttcgtgtggacgttttaatatgaaatattgtatcagaatgataggggaacggtcaaggaggctttggggaggaatgtgatatgaagattataatagaacggaatccagagattttttgaaacacttatagataaccacaaaaatagtttcaaaataaaaccatattttgaaagaaacgtattgtaaaaaaataaggttgggtttaaaatgaaacaaaagaaacggaaaccaaacaaatttaacgggacaaaggttttaagttgaaacatatgaggaggaacaaaatggctgtttgtcatgtaaagcttccgccctgtgcctatgcgggggaaggaagtattgaaaagattcgagagatcgtcaaaaaagaaaatgcaaattctattcttgtttttacggataaaggacttcgggcatcggggctgtctgatcttgtgacgaatgagctggatggaatcggagccaggtatacagtgtttgacaatataaagccagagccggcctacacagatgtggaggaactattggctgaggtggagaatgtacagggcgattttgtgattgccatcggtggaggcagcgttatggatgcggccaagctgatcacaatattaaagaatgctccctataccatccgagatttactggaagatccttctatcgcaaagaaatatataaaatctgtaatggtccccaccacctgtggtactggggcagaagctacctgcaatgccattgttgccattccggaagaacagtccaagaaggggattgtgaatgacagtatgattccagactatgtgatcctggacgccaggaccatccgtcagcttccaaagtctattgtggctgccaccggtgtagatgctctggcccatgttgtagagtgctatacttctaaaaaggcaaccatactcagtgatacatacgctctggcaggagcaaagctgattttcgataatatccggaaggcttatgaaaatccggatgatatggaagcaaaaaataatatgatgctgggcgcatattacggcggtgtggctattacagccagcggaaccactgcggttcatgcactgtcctatcctttaggaggaaaataccacattgcccacggtgtgtccaatgcgattttgtttgctcatgtaatggaatacaacaaggaagcatgtgaaacacagcttgctcagctttgtgacgccatcaatccatcctggtatgaaaagagtgtttccaagaaggcccagtacattattgatcagattgtagatattgtaaaagtgacgaatattcctacggatttggaacagtttggtgtgaaaatagaggatctggattttttggtagatgccggaagcaagcagaccagacttctggtaaataaccgaagagaactgtcactggaagacatccgttccatctatctgaaggtgttaaaataagatagaatttctgtaagaatagaaggaggaaaaacaaatgattcagaaaccaattctcggcattaccatgggtgatccatctggaaacggccctgagatttctgtaaaggcattgatggatgcgtctgtttatgaaaaatgccgtccgttgatcattggcgatgccgtttgtatggaggcggcagtcaaaacggtaaaaggcgccgagaacatgaagatccatgtggtgaaggatgtaaaagaggcaaagtttcagtatggtacaatcgatgtgtacgatatggagatcattgatatccagaaacgtctgtataaaaaagacagagcaatgcttgcccagactatgccaaaggaggtacttgcggcagcctacaaggaaagtcagacgatgtgcggcgagtgtgcgttccagtatgtgaaaaaggtaattgagctggccatggatggccaggtggacgcaacagtcaccaatgctctcaacaaggaccatatcaacatggcgggccatcactactcaggacatacagaaatctatgcccactacaccaatacgcccaaatacaccatgatgttagctcatgaaggtttgagagtggttcatgtttccacacatgtttctctgagagaggcctgtgaccgggtgaaaaaggaccgtgtgctggattgtatacatattgcaaatgagggctgcaaggctcttggaataaagaaaccgaaaatcggagtggcaggattgaatcctcattgtggtgagaatggaatgtttggcagggaagaaatagaagagattcagccagccattgacgctgctcttgcagagggcattgacattcctgaaaaggcacccacaccgccagatacagtgttttcaaaggcactgggtggatggtatgatattgttgtggtcatgtatcatgaccagggccacattcccctgaagctgaaaggctttgtatacaatcatgaactgaagaaatgggatgcggtagcaggagtgaatgtgaccttaggtctgcccattatcagggcttctgtggatcatggaaccggagagggacatgcaggtgacggaagtgcaaatgagctgagcttagtaaatgcaatggattacgccattacaatggcaaatgcaaaatcaaagtgatcaggccgatgcggcttagataaatcaaaacccaattaaaaggaggaaaaagtaatgaaaaaattaaccaaaatcgcaaccgtacttacagcagggatgctggcaatgagctctttagcaacagtggcttctgcttctgattatgctttgagcgacccggtggatctgacctttgccgctcaggaggtaggaaccgctgcatacaactatgcggcagctcttcagacagtaatgctcaaagagcttccggaaggctctaacattgccatcaccacaacctcaccaggtggagtaggcgctcctattattgtaaacggcggagatcagtgtgatcttgtaatgtccaattccgcaccggcaaaatggtctgcagaggagggaattcttggaaacgaccccaccgaagaagttgcagctctggcaggcggattgggaaatgactttattaatgtaatgttcacacagaaatttgtggatgatacaggaattaccactgttgaagaactggtagagaagaagcatcctgtgaagatcgtgatcaagagcacaggtactctgggcgagctggcagctgaaaaggtgctcgaagtgcttggcgttacctttgatgatattaaggaatggggcggcaccgttgaaatgaccggtggagacgctataaaatctggtcttcaggatgatctgtatgatatgacgattgaccatattggagcaggccagtccaacaccacagagctttgcctgacccatgatatgtatgatgtacagatggcagacagcacattggatgccttggtagagcttggttttgaatatgtgacagttccggcagatacatggaacggacagacagaggaaattaaatctgttggttcccagcaggtagttcttgttgattccaatatggatgatgcaactgcctacaacctgacaaaggctatcgttgagcacaaggatgaactggctgaggcagtttccacaatgagctacttcgatccccagacaggcggcacaatgggaatgacaggtgtggcacttcatcctggtgcaaaagcttactatgaggagaacggttatccggttgaataataccgcagctgttttataacaagaaaatcaaatggcggggtgtttgcccacaccccgctatacttataatttgaagagggatgagaagtatgggaaacgaaaaatctatgaaaatccgtaaatggattatggtaattgttacggtcattttctttgcctatcagatgtatctggctcttgtaaagcagcttgcaccgatgctgcagggacctctgcatttagtactggcgttgactctggcatttctttataatcccgtggataaaaaataccgcaaaaagataactaaggctgcacaggcaaagggagaagaggcagatccttctgtactgaataagcatagctggatgaactggtttgatgtatttgtttatgcgggccttgcttatatgctttactatgtggtgaccagatacgaatatctgagcacacagtttgttatgaacattagtcccgtggagaccaaggacaatatcatgatggtgatcaccattgtccttttgttggtagctgtgtaccgtaccttgggagtggtactggcaggctttattgctgtttttattctttatgcatggacagccccttaccttccgggaattttatataccagaggaaaatcagtggaatccttcctgaagcagtttaccacaggaatggtcatgactcagagcggtgtattcggaacaccgttgtacacctctgccagcacgttgttctattttattgttttcggcgcgtttttctctgcattcggaggcggacagcttttgatcgatgtaggtatgaagttctccaataaatcctctggagctcctgccaaggcggcagttatttcttccggtcttatgggcatgatctctggttctgctgtggcgaacgtagctaccacaggtgttatgacgatccctatgatgaaaaaaattggctatgagcctgaggaggccggtgcagtggaagcagtggcatccacaggaggtcagatcatgcctcctatcatgggtgttggtgcatttatcatggcagaaatgcttggcattcagtattccaaagtggcggcggcagctattattcccgcagttgcttactattttgcagtgtttgtcctggttgaccgtattgcagcaaagcacgccaatgatttcaacaagggtgtggacgccagcatcaaggtaaaacgtaaggtactcacccgcctttacttgctgcttccggcagtggttctggttgtgtatattgtacggggcgcttctttgatgcgtgcgggtatgatcggtattttcttctgtctcctttgtgatgtggtgagctacataatttatgcgaagaaaaaaggcagctttgatctgaaggatattttttccagtgacaaatcggttgagaatcatgactttgttgacctgaagggaatctgggactgctgtatgagcggtgcaaaacaggctgctgaaattgccattcccaccgctgcctgtggtattatcattaatgttgtgaccggtcagacttctttggctacaaatttggctggtgtgatctcaagcctgggaaccacaaatctgatgcttgctctgctcatcgcgatggtagggtgtatgctgctgggtatggcgcttcctacagttgcagcctatctggtaggtgttattttgtttgttccctgtatccgtcctcttcttacttctggactggctgctgtatattctgatcctaatacagtgaacctgtgtgcgaacatgtttgtattttatttcggtattatggcccaaattactccgcctgtatgtgttgcttcctatacggcggcgggaattgcagacggaaatgccatgaagacgggattgaatggtttcttctttgcattgaccggtttcctggttccatttgtatttatttataatccggccatcctgcttcaaggtacagtagttgaaattgtcattgccacagctatgcttttggcagggtgtttcttcctggctgttactgtgtcagggttctttggaagcaagatgaatttggttgagcgggtggtgcttctggcggcagccttatgccttatcagtccggagattattacttctgtgatcggcgtagtgatcggcgtggcgattatgtttatgaatatgatgcggggcaaaaaggcaaagaccgcttaaagtcaaagggtgagaatttgaagttgatggcctgcatttagtaaaaagaggtagaaaatggtaaaattgcttataattgcagatgattttacaggggcattggatacgggcgttcagttttctgccggcggcatcaagacaaaggtaattgtagacaatcatctggaaatccgggaagatgagaagtatcaggcattggtgattgatgctgagacccggcacctgccacaggcggaagcatatcaggtgatttatgaaattgtttttgcggcagaaaaagccggaattccctatatctataagaagaccgattctgctctgagaggaaatatcgggagtgaactgacagcggtgcttgatgcagccaatgtgagcacacttccctttgttcccgcattcccaaaaatgaatcggatcacacgcaagggtatacattatatagatggggtgccggtgagcaggagcgttttcgggaaggatccttttgaaccggtgacagaggattcagtaaaaaagattatttgttcccagcgttccgtgtcggtgacagaggtatgggaaacagaaaaagaaaagggcgcagatcaagagggtattgtgatctatgatgcagttacggatgagtcgctggaagagacagcagctgttttgaaggcccagggactgtgtcacgtgttggcaggatgcgctggttttgcagcgatccttcctcagcttcttgagctgcagggggaagaaccggaaaaagaagagcttccttccagacttttggttgtgtgcggaagtgtgaatcctattaccagaaaacagcttgcctatggcgcgtcctgcggctaccgcaaaatccagctcctgccaaaacagaagctggatcaggactggtgggacagcagccaggggcaggagatgcttagaaatataaaacagaccctggaggacgaggactgctgtatcattgacagcaatgacccagaaggaaccaacagtaccatagattacgctgcggataatcacatcaccttggaggaggtgcgggtacgcatctctcgtaccatgggaatggtggcgaaaaaattgctggaacaggagatccaaaccacctttctggtgaccggcggcgatactctgctgggcctcatgcgtcagataggcagtaatgaattgacgcccatttgtgagatggcaccgggatctgtacttacacggcttatttggaacggaaaaatatactatatcattacgaaatccggaggcttcggagacgagaagctgctggaacagattgtgagaaaattaagatgtagaaagtaaaggaggagacacgatggcatatcagacattacctggtttgacgccggacggcattatgtacgtgaacgaggatcttgggacggtggaggcattgctgcctcctggggaatataaaagtgctcattcacctgcgctgttggaactggagaacggcgatctgctctgtgcatggtttgcgggatcctttgaagggagcgctgatgtgagcattatttgtgcaagacttgccgcaggcagtgcccagtgggagaaaccggtgcaggtgtcccatgatccaaagcgcagtgaacagaatccatccctttttgctggtccagatggaaaggtatgggcaatgtataccgctcagctggacagagtagaagggaaagacaatatgcagttcacatctgttatccgctgccagaagagcggtgatggcggaaagacatgggaagactacacgactatatttcctcaagagggaagcttctgccgtcagcccatccaggtgctgtctaacggacgttggatttttggaaactggatctgcacggactcagagcttggacttaccggagatcccacggcatttcggatttccgatgatcagggaaaaacctggaagacagtagaaatgccaaaaagcaatggctgtgtacatgccaatgtggtagagcttgcgccaggacaccttgcggcatttatgaggagcagggcggcggataatatttaccgcagcgaatccctggataatggagagacctggtctgttcctgtacccacagtgcttcccaacaacaactccagcattagtgccataaggcttcagagtggcagagtggccattgcctataatcccacttgtaccccctgcccaactcccggagtcgctgcctggcctgggctgcgctgcccggtggctgtggctctgtctgaggatggaggactgacgttccccatgattcgttatatggaacggggagaaggttttatgggagaagagaaccggacaaataacaagcagtacgaatatccttatttgatgcagagccgggacggaaaacttcatttggctttcgcttataaaaatcggattggtgtaaaatatatgtgcttttccgaggaggacgtgatgggagccaaaagggagaaagtaggactctataatcctacggcggctcagagcagatagttttagaaagctcaccgccccgccatcctggactggctggggcggtttttacatggtctaaggagaggaacagaaaaatgattattgatcagttggagaatattctattttacgagaaactgttgccccacgtggcagaaggaatggccaaggtgaaagaactgggctctgatcctttggtgggcagatacgaatttccgggcggataccttatggttcaaaagggagagacaaagcccatggatgagggaacctttgaagctcaccgaaaatatattgatgtgcagattcttcttgagggctgtgaagaggtggcctggaaaccattgggagagcttactacggcaataccctatgaccaggccaaggatgcagagcggctggacggcagcaaagaacatcaaatgctgatatctgaaggaatgttctatgcggcatatccgtcggatggacataaaccagtctctcacaccaaggaaaagcacagttttacaaaaatagtgatgaaactgcctacggaatagaaaactgccagcagggaaggatatttcctgctgatgttgtacagaacaggaggaataaggaaatggctgaagtaaaaggaattatagccgcaatgcagacgcccatgtatgaggacggaagcattaatgaagcggagatgagaaagcagatcaaccggcagattgatgcgggcgtagatgccgtattctgccttggcaccaacggcgaattttatattatgaatacccaggaaaaaatccgggtgatggaaatttttgtggacgagacaaaagggcgggtgccggtatatgccgggacaggctgcatcagcacaaaggataccattgagttgtcaaagaaggcgaaagagatcggagtggatattctttcagttattaccccttacttcgcggctctgaaccaggatgaactttacagccactatgcaaatgtggccgaggcagtggatctgcctattgtgatgtacaacattccggcaagaacaggtgcggctcttgcgccaaaaactgttggaaagctggcccaaaactataaaaacattgtgggagtgaaggattccagcggaaactttaacaatattctccagtatattgatgaaacggacacagataccttctcggtactttctggaaatgacgcattgattctttggacactgctggccggtgggaaaggcgggatcactgccattgccaatattctgcccacggtaatggttcgtatttaccagaattatttaaagggcgatattgaagcagcgaaaaaagctcagtcatccatcgcacccatcagggattgtttcaaattcggcaaccccaactccatcgtaaaatgtgccacgaatttaattggacagccagtaggaccctgccgggctccttttggaatggtaagcgatgctgcccaaaaagagattatgaagtgtattgatacttattactcagaatacaagaataaataaaaaataaagcaaaaccgccccactgtggctccacggtgcggcggtttttcgcggctattggacagcacaggccaggggcctttgtcatcatcagacttgctacttgagtttatgtgtgataaaatgtgttgaagaaaattgtagaaggaaagggacttactatgaaactgggaatcgtaggtttgccaaatgttggaaaaagtacattgtttaattcattgactaaggcaggggcagaatctgccaactatcccttctgtaccattgatcccaacgtgggtgtggtgacagtgccggatgagaggctgaagctgctgggagatttctatcattccaagaaggtgaccccggctgtcattgaatttgtggatattgcaggacttgtgaaaggagcttccaagggagagggattgggcaaccagttcctggccaacatccgggaggtggatgccattgtacatgtggtccgctgctttgaggactccaatgtgatccatgtggacggaagcattgatcctctccgggatattgagaccatcaatctggagctgatcttttctgatctggagattctggagcgcaggatcgccaaggtgaccaaaaccgccagaatggacaaggaggctgccaaggaactggactttctccagaagatcaaagcacatttggaggatggaaagatggcaatcaccctggagccggagaatgaggacgaggaaggcttcctgggaacctataacctgctcacaggcaagcctgtgatctatgcggccaatgtggctgaggacgatctggcggatgaggcacagtccaacgcctatgtacagtccgtgagggaatatgccaaagaacataagagcgaggttttcgtgatctgtgcccagattgagcaggagatcgccgagctggacgatgacgagaagaaaatgtttctggaagacctgggactgaaggagtccggactggagaaaatggtaaaggccagctaccaattgctgggacttcagagcttccttacctccggtgaggacgagacaagagcctggaccattaagatcggtaccaaagccccccaggcggcaggaaaaatccacacagactttgagaggggctttatcaaggcagaggtggtgaactatcaggaccttctggactgcggttcctatgcaggagccagagaaaaaggcctggtaagaatggaagggaaagagtatgtggtgcaggacggcgatgtgatcctgttccgattcaacgtataagataggtgctgctatggaaatgtcaattcacttcccgaacctgggaattcacctggatcatgtggggaggactgttgaactatatggttttcacataagctactatgggattcttcttgcagtgggaatgctgctggggatcacctatgtggtcatgctggctaagcgtacaaatcagaatcaggacatgtatctgtctttgatcattgtctccggtatagctgcggttctgggagccagatttttctatgtgctcttttctctggagctgctcaaggggcaggttttcggaatttttgatgtgcgcaacggaggcttttccctgtatggcgctttgctgggaggtgtgctcgctgcagttcttttctgccggatcagaaagctgcccttctggaaaatggcagatactgtctgcatgggcattgtggttgtgcagataataggaaggtgggggaatttctttaaccgggaatccttcggggagtatacggacaatctggcagctatgcagattcccgcatcctttgccagggccggggagatcacctcccagatgaaagcccatatgcagaccatacagggagtggagttcattcaggtgcatccagcctttctgtatgaaagtctgtggtgcctgggacttcttcttttcctaatgtggtatcgctttcaccggagattccagggtgaaatgttcatggtctatctgggcggctacagcctggggagagtgtggatcgagggactgcgcacagaccagcttctgatcccggggacaagacttcccgtttctcagatcattgcaggtgccttggtggtgttctgttttgtggatattgtgatccgccgcattatggccaagaagaggcgggcagccaaacagcgcaggagagaggaaacctatgcagcagaagcggcccaattcggcggtcctgaggatgccgataaggagagtgaagagaaaacccagagtgcccctgtggatgaaaagatccaggaggaagagaaatccagggatcgtaccctggaccctctggagatcaatctggagtattatgagcctgaagtgccagatcgagaggaagaggatttctttgaacaggagcattcaaaccagaaaggatctggggaagaaccagagattaagtgaagaactggatgaactgattgtgcaatatcagcagatttttcgacaaaattaacagattcgttttagagaaaattaagtggggagctacatgcagaggcgtgtagttccttttttaatgcattctgccaaatattgaaaaaaacccggaaaatcccggttttactggaaaaaactgggtttttcccacgcaaaaaaaattaaaaagaccaccgttttctcttgtaattttaatttaaatggtttagaataggcatataagtggtagaaagtggagaatagtggtgacagatggagggaaagtggcagacgacaccatcttcacccacttggggatacataggggagacatgtattcctgtgagagtaggtgagtaaacatgttcatgggagagtataatcatacaattgacgcgaagggacggttgattatcccctccaagtttcgcgaactcctgggagatgagttcgtgctgacaaaggggctggacggctgtttgtcaatttatcctatggacgaatgggaaacctttgaagaaaaactcaaagccttaccacttacaaataaaaatgcaagaaccttctcacgtttctttgtagccggcgcctgtacatgtgagctggacaagcaggggagaattctcgtaccggcaacgctgcgggaatttgcaggtctggataaggatgtagtgcttaccgggaatctgaacaggattgaggtttggagcaaagaaaagtggagcgaaaactgtaattacgatgacatggatgctattgcagaagggatgcaggaaatgggcattgtgatttaacccaaaaggttgtatgagatcataatctgggaaattatgatttccggttgcgctcagggaaaatccaacagcaggagacggagatggaatttaaacacaaatctgtattactggaagagaccattgaaggtctgaagatcaggccagacggaatctatgtggatgggaccttgggaggtgcagggcacgcctatgaggtgtgtaaaagactttctgccaaggggagatttattggcatagatcaagaccaagacgcaataattgctgcgagtggacggttggaggagttcaaagaacggacaacaatcattcgcagcaattattgttacatggtagaagagctggcccgtataggcgtccataaggtggacggcatagtactggacctgggagtttcttcctaccagctggacaaagcagacagaggcttcacctaccgggtggacgcgcctttggatatgcgtatggaccagagacaggcacgtaccgcggcggacattgtcaacgggtaccaggaaagagaattataccggatcattcgtgattacggtgaagataaatttgcaaaaaacattgccaagcatattgtggcagagagggccaaaaagcccatagaaaccacaggggagctgacggagatcatccgtcacgccataccaatgaaaatacaggcagcaggaggccatcccgcaaagcggaccttccaggccatccggatcgaactgaaccgggagctggatgttctgcgggaatctctggatggaatgatcgatctgttggatgaagggggacgcatctgcatcatcacctttcactccctggaggacaggatcgtgaagaccattttccggaaaaatgaaaatccctgtacctgtcccagtaattttccggtatgtgtatgcggcaaggtgtcaaagggcagggtgatcaccagaaagcccatattgcccggcgcagaggagatggaggaaaacccccgctccaaaagtgccaagcttcgcatctttgaacggggatagcatacggttggggagagccggtctgtcttaaagacgcagaacgtttcacgcatacagcagaagattcagcagtaagcgattaggcaaggggaataaaatggcaaacaacgcagttaggacatcaaacagaagaggatatgaggcagccaggaacgttgcagtcagaaatggaaaaagtgcagcttatgtggatgggaatacggccagacgtcttcagacgccggaacgtaagaaggagaccaggcccgcagctgctcccaatgtaagtgcgactgcccgcaggaacagagaaaaggccgccagcatgagctgggggtttgtaatatttcttaccgtggtttccattgccctgctggtaagtggtgttcacttcctgcagatgaaatccgagataaccacaaaaattgaagaagtggcagccgtggagtcagagctgagtcagctgaaggaagacaatgacgcgtactacagccagatcacttccacagcagatttaaatgagatcaagaaaaaagccatgggtgagctgggcatgagatatcccactgaagatcagattgtaacttatgagacatcaaggagcagctatgtgcgccagtatcaggaagtaccggacacgaagtaggtgagaatttgagcagaagcagaagaaaacccaagaaaaaaataaatatgcagatgaggaaaaagctggtgggactgtttgttgcagtcttgctggctttagtcggtttgaccctgagaattacatacattaacgccaccagcggcgccaaatacaaaaaacaggttctcagtcaggcccagcagcagtatgacagccgtgtgctcccaggcaagcggggagatatatatgaccgaaacggcaatgtgctggccaccagcaacaaggtgtacaacttgatcctggactgtaaaactgcaaattcccaggaggggatctatgtagagcccacggtgaaggctttgacacagctgatggggatcgatgagaccaaggtgcgcaccaagctcaccagtaactccaccgagaacagccaatatgagattctgaaaaaagaagtcaccatggatcagaagaaggagtgggagaaatatctggaaattccagaggacaccaccatgagccaggaggaacaggaggcccgcagccgggtgaagggtgtatggtttgaggagacctacctgcgcagctatcccttttcctctctggcctgtgataccattggctttacctttgacagagataccgcagactgggggctggaaggctattacaacagcaccctggtgggagttgacggccgccggtacggatatctgaatcagaattccgatgtggagcagaccatcatcccgcctgtgactgggagaaatattatcacaagcctggatgtgggcgcccagcagattgtggagaaatatgtaaatgcttttaatgaggccatgggcgcagccaatgtgggggtgatcgtggaggatccttccactggagaaatccttgccatggacggcggggaccggtatgatctgaataagcccagagatatgtccaatgtgcataccaaggaagagattgaggccatgaacgacaaggagaccgtggacgcgctcaatgccatgtggaacaatttctgcattacagacgcctttgaacccggatccgtggtgaagcccattgtggttgcctccgctttggagaaaggggcgatcacggataagaccaacttgtactgtgacggctttgagcagttcggatccagtgagagtgatatgatccgctgctgggtctatccaggggcccatggagaggaatcacttatggatgtgatcgccaattcctgtaatgatgccatgatgcagatcggtgccattatgggaaaggaacagtttatcaaaacccagaccctgtttaatttcggcaccaggacagggatcgacctgccaaacgagggtacagggatcatccataccacagacagtatgggggtgacggagctggcctgttccaccttcggacagggctttacctgcaccatgatccaggagatcaacgccatctgctcagtggtgaacgggggttattattatcagcctcattttgtcactaaggtgacagacagcaacggaagtgtgatcaaaaatatttcccccactttgctgaagcagaccatctctaccaatatttccgctaactccagaaaatatatggaggcctgtgttcttcagggtactggtaccagctccaaggttcagggctacagcatgggaggaaagacgggaacagcagaaaagcttcccagaaacaacggtaaatacctggtttcctttgtgggctttgccccggtggaggatcccaaggtagtggtctatgtggtcattgacgaggcagatacagaggcccaggacaacagtgcccttccccagtatgtggcacaggggatcctctccgagctgcttccgtacctgaacatcactcctgatgaggcggacggctataccccaagtaccagtctgtggacgggcttcagcggccatctgaaggatgtgaacaccacgatcctcacagacgaggagggaaattatgtggaccgggacggaaaccgcattgattcagagggcaaccgcattgacgagcagggatatcttctggacgagaacggaaattaccggtttgacgacaatggacagccagtgttgacagaggcccagaccaagggagcggcagggtaccgtacagaggccattgacggcgccaatctgccggagcctccggaggatacctccgagcccctcataggaaacgacatggagagtgatgggatcaccaatgaagaggccggtttagaataatttaagaaatttgtccctggaatgagacatacccccgcaaaagactcatatatttatatgacggcttttgcggggtttttttatgaaaaaaaacagaacgtatcataagaaaaagatcctggtggtcttcctggggtgttctctgctgctgcttgggcttttgggacggcttatttatttaatgggatttcagtcagactattattatgaaaaggccaaggaccttcatgaaagagagagagacatcaaggcagccaggggagagattctggatgccaacggaaaagtcctggcctccaaccggaccgtatgtaccatttctgtcatccacagccagatcaaggagccggagaaggtgatctccatgctgtgcagggaactggaaatggacgaggagacagtgcgcaaacgggtggagaaggtgtctgccattgaacgggtacgcaccaatgtggacaaggaagtgggagaccgcatccgggattatgagctgtccggggtgaaggtggatgaggatttcaagcggtattatccctacggcactctggcctccaaggttctggggttcaccgggggagataaccaggggatcgtgggcctggaggtaaagtatgattctgttctggcaggcagtccggggaaaatactcaccaccacagatgccaggggagtggagctggatgagatcggcgaaagccgggtggacccggtgccgggagacaatctgcgcatcagcctggatgctgacatccaggaatatgtccagcaggcggccacaaaggtcatggaggagaaggaggcggaccgggtgtccattcttcttatgaatccccagaacggggaaatcctggccatggccaatgtgccggagtttgatctgaatgacccctttaccctcaatgaggacatggataccaccgggctttctgataaggaaaaacaggacctgctcaatcagatgtggaggaatccctgcctgaacgatacctatgagccgggatccacctttaagatcatcaccatgtccgcaggcctggaggcaggcgtggtgggactcaatgacaatttttactgcccgggctataaaatcgtggatgacagacgcattcactgtgccaaccggaacggccacggagcagagacctttctggtgggggcgcagaactcctgcaatccggttttcattgaagtgggccttcgtctgggggtggaccggtattataaatattttaagcagttcggccttttgaagctcactgggatcgatctgcccggggaggcagggaccattatgcatcagaagaaaaatatgggggaggtggagctggccacggtctccttcggccagtcctttcagatcacacccatccagcttgccaccacggtgagctctctcattaacgggggacgtcgtatcacccctcatttgggagtggctgtggagagcacggacggcacctatgtgaaggagctggagtatcccgtggaggaggggatcctttcccaggagacctcagagaccgtgcgttatattttggagcatgtggtatctgaaggctccggaaaaaatgccaaaatctccggctacaccataggcggaaagacggccacctcacagaccctgcccagaagcgcaaaccgttatatttcctccttcctaggtttttccccggcagaagatccccaggtactgggcctgtgtatcatccataatccccagggagtttattatggaggcaccattgcggcgccggtgatccggagcatttttgagaacgtgctgccatatttgaacgttcccaagaccggaaaggaggatcccaccccgactcctgaaccttagagggcttttccacgtgacaccagcccggaaatacttgcgctgaagcgggaaaagctttatactaaggagtgtctatgaaacagaaaacaaaagaatagaagaggtgtaacatggaagctcaagtagtaattcctgtgctgatttcattcgcgatcagcgtagtactaggaccaattgtaattccctttctgcggaagctgaaaatgggtcagacagaacgtacagaaggcgtgcagtctcacctgcaaaaggcaggaactcccaccatgggcggaattatattcttgctggccacagtggtgacagctttgttttatgtgaaggattatccgaaaattattccggtgctttttctcaccctgggctttggactggtgggattcctggacgattatttaaaagttgtgctcaagcgctctgacggccttctggcctggcagaaattcctgcttcagattgtgctcaccgcaatttttgtgttctatcttatgaactataccgatgtatccctgaccatgaagattccattctggagcggccattatctcaatgtgggctggctggcagtgcccatcctgttctttgcagtgatcggaaccgtgaatggagtgaacttcacagacggcctggacggcctggcctccagcgtgaccctgatcgtggccgttttctttactgtggtctctctgggtacaaagagcggcattgagcccattacctgtgcagttgtaggcggtcttatgggattcttgctgtttaacgtatatcctgccaaggtttttatgggggatacaggctccctggctctgggcggctttgtggccggcgcggcctatatgatgcagatgcctctgtttctcattattgtgggcctgatctatctggtggaggttgcctctgtcatgatccaggtgacctatttcaaggccactcatggaaaaaggtttttcaagatggcgcccatccatcatcatttcgagctgtgcggatggagtgagaccaggatcgtggcagtgttttccgtgatcacggcagtgatgtgcctgatcggaatgcttgccctgtaggaggagacagatgatggaactaagaggaaaaaatgtgctggtatttggctccgggatcagcgggatcggggccagtgacctgctgggcgctgtgggagccctgccgatcatttatgatggaaaagcagacctggacaaggaagcagtgatacataaaacaaagggcggctatcctgtggaggtctatgccggggaacttcccattgaggttacggaaaagctggatctggtggtgctaagccccggcgtgcccacagatctgcccatagtaaaaagtttttatgataagggacttcctgtatggggagaggtggagctggcctttcagatgggaaagggccaggttctcgccataacaggaaccaacggaaagaccactaccacagcccttctgggaaagatcatggcagatgcccgggattccgtgtatgtggttggaaatatcggtactccctatacctctgtggccctggatatgagagaggacacagtgactgtggcggagatcagcagctttcagctggagaccattgatcagtttgcccccagggtgagtgccatattaaatatcacagaggatcatctgaaccggcaccataccatggaggaatatatccgtgtgaaggagctgatcacgaagaatcagggagcagatgactactgcgtgctgaactatgaggatgaggtgctccgggaattcgggaaccatataaaatctaaggtggtgtatttttccagtctgcagaccctggaagaggggattttcctggatggtgaccagattgtgctgaaaacaccaaaggagactatccaggtggtgaaaaccggggatctgaagatcttaggacggcacaatcacgagaacgtgatggcggctgtggcgatggcctactatgccggggtgcctatggaaagcattcagaaaagtgtatgtgcatttacggctgtggagcatcgcattgaatttgtaacggagaagaagggcgtggcctattataatgactccaaggggaccaaccctgatgcagccattaagggcattcaggccatggaccggcccaccctgctcatcggcgggggatatgacaaggaatccagttatgacgaatggattcaggcctttgacggaaaggtccgctatctggtgctcatcggccagacaaaggagaagatcaaagaagcagctctgagtcagggctttcaggatattatcctgtgtgaggatctcaaggaggctgtggagatctgtgcccagaaagcaaatcctggagacgccgtgctcctgtcaccggcctgcgcaagctggggccagtttgacaactatgagcagcgggggaaactgtttaaggaatatgtaaaagccctgtgagaagggtgataaaaataaaaaagagcaataaaaaaataccggagtccatatttaaaatgtggagcttcggtattttttatgacataggaaagttcttagaactttcctatgtcataaaaaccctccgggggatgcacacaatgtgccagggaaagctgcttcgcagctgcacattggcgcacaaagctgccaagcccctcatgagtgaggggatggggagttgaagcgggcttgtccgctttgttttgtgacaaaactgtcaagccactcaggtgtgaggacctggggagctgaagggggccttgctttgatttacatagggcgtgtcacaccgttgtctccctgctttttaatatccgccacagagtactgcggctgatgcccagacgcttggcggttttttccttgctcatgttttcctggtccaggactgtgcggataatatcatagttgatctcatccagcgtccggtccagattaaagggaatctgctcccgtacctgccagcagtggacgggctgctcctttttcaggatgtccgtaacactctccttggtgatgtaggaggatttggtgatcacggccagttccttcaaaattctatggaattggtccaggttgtggttccatggaaaattctgcatggataccagggcgtcagcctcaaaaccgatgatctgttttcccagggaggcgttcaattggttcaggtaaagggcgctgatgctgggaatatcgtccctgcggctgcgcaggggttccaggcggagtgtaaggcagttcagctggttggccaggtagctgcagaccggagagtccatggcaggaacttccggggtttccacataggagaagatcaaacggttgcgtttgagtacattgctctgctcaaaataggagaataagcggtcaagctgggtgttgttcagtttttccacgcccttgagatgaatggtggtgtgcacggtgtttaatggagaattgtcattgtccagaagagcggcccaccgcttttcgttgagaagaccacagttgatcagataatagggaccattctgatagggaccctgttcatagatcagagaagcggccttgtcctttccggtgcccacctcgcccagaataagaatcggaaatgtggtagctgcgtaatcctcgataaagcttcttgttttccctatataaatggcgctgttgtagtaattccggaaatcctccggatccgcggcgggtttgttgaaaatagcgatgctgttgtccgtatctggaaacagggcctgcttttttgtcacggtcacaatggtatatttctgctcatcataatatacatgccggttggacagactcaggattgtccgtgcatatttggtatccatgcgaaaatccggccgctccagaaattcctggagatgctcctccatggtctgggccagagcggtgcggaaattctcctgggccagctcgtccactgtggagtaccacagcttgccctcagggtcgtagatgaggaaatcctcatccctgtccgtgaggatggtctgaaacaattctttctgcttataaatcctctgagaggatttcaccagcttcactgcttcgtttaaggctgtttcaatgctctccgtacctgaggagattaaaatggaattcatacccaactgaaccgctgtggtggagccgatcatatcgcagatgatcaggccgtagccctgctttttcagcatggacagggtagggtaggcatcctcggctttttcgaaggtaaagatatcaattttatactggagcaaatcgcacaaaagcttggcgcagtttgtgatgctgggaaaaccggcaatggccagcttgtcggagtagttttctgccattttgatggcccgcagcacgtcatatacagagatagctgtttccactacagggatttctccgctggaacggatcaggtccgctgttccgcctcgggaaaggatcacatcataattctgatgctctaaggtctttgcgatatgaaggccagtagacaggtttcccacacggacagtcacatccagatcatccctttgctgggcaatggctaggatggtctctgccattccttcatagggggcaatggctaaaatttttatttttttcataaatacctcccattactcattttaccgaactggaaagtccctgaataaaatgtgcggaataaaaaggaactttctatgttttatatatctacattataactagatatagacacggatacaactagattttacaaggatatgttttaaatttaaacaaaaatagtttcttgtacagttgcgtattttggggaaatgaaatacaataatgatacaggaaaaatatgtttcaaaagaaaacaatcagaaagacgatggcattttaaaagctatcgatatttcctatatccggtatataaaaataaactgtctcaccgccggcttaattttcaccttatttttttcatgcatacagagagtctctctgaatcctgccggctttgggaaggccgctgtcttagggcagcggtctttttttataggatttctcatagattataacaaggtcttttgggagcgtataagcatggaaaaaaggaaagaaaaggaaggaccggcagacaccgggccgaagaatacctcggaccggctgctgtttcttctggtgctggtgctggtggtattcggcatggccatgctgtacagcaccagcgcctacaacggcagggtgaaatttcatgactccgggtattatttcaaaaagcagttgtttgcaacagcgctggggctgatgggaatgtatctggtatcccagatggactaccactttctcacaaagctggcgccatttttatatgtgatatcccttctgttatccacagcagtgctgatcttcggccaggagatcaacgggtccaagcgctggctgtccctgggccctctgtccttccagccctcagagttcgccaaggtggcggtgatcctccttctggcctgggaaattgagcggaccaaaaaggatacagcaggcttttggtctatgtgcagggtcatgctcacccttctgcccattgtgggccttgtgggaaccaacaacctgagcacagccattatcattctgggaatcggtgttatcctgatcttcgtatccaatcccaaatatcttcagtttgtggggcttggcctgtcgggaatcggctttgtggccatcttcctggcggcggagagttaccgtctggagcgtctggccatctggagaaatccagaaaaatatgaaaaaggctttcaaaccattcagggtctgtacgccatcggaagcggcggactcttcggaacaggttttggcagcagcctgcagaagctggggtttgtgcccgaggcccagaacgacatgatcttttccattatctgtgaagagctggggctgtgcggtgcgggaattctgattgtgatcttcggtcttcttctttggcggctggcggtgatcgccatggggagcccagatcttttgggagccttgatcgctgcgggaattatgggccacatggcaatccaggtgatcttaaatatcgcggtggtgaccaataccatccccaacacagggatcactctgccctttgtgagctatggaggcacctcagtcatgtttcttttgggagaaatgggcctggcgctgagtgtaagccgtcacaaaaaaattccccctgcataaactaatgagtaagacgccctggggagtggaagatttggatggaattcgcatagtgggcggaacgcccctgaatggacagacagcagtacagggttccaagaattcagcactgcccatgatggctgcggccattttgggcaatggagtcagtgtattgcagggctgtccgaaaattgcagacgtttactgtatggaagaaattttagacggcctgggggttgtcagctggtgggaaaaggaagatttgtatctggactgccgtttcctgaagggcacagaagtgaaagcggaatatgcaggcagaatgaggtcctccatcatccttctgggagccttgctgggacggatgggagaggggagcatcggctaccccggcggctgtgtcataggagaaaggccggttgacctgcatttatacgccctggagaggctgggagcccgtatcagcgaggccggcgacctgatccgggcacagggagctttgcagggaaaccggattttttttagaaaaagaagtgtgggagccactgagcaggccatcttaggggctgtgcgtgcccagggcctcacaatgattgaaaactgcgccagagagccggaaattttctggctgtgccggtgtcttcaaagtatgggggcatccatttatggggcaggaggggactgcattttcatacagggaacccgggagctgaaggcgttttccatgaaggttcccacagaccggatcgtggcaggcacctatgtgctggccggggctgccaccagaggaaaagtcacccttctgggggctcctgtggaggaaatgcaggcattccttcgtgtatataggaaaatgggtggacaatatgaaggaaacggtggtaaactagtaacggacagcacaagggtgcgctttccagttccctatctggaaacggacagctatcccggctttcccacagatctgcagtccccccttttggcagtgctggcaggcatcaacggaaccagtattgtgcgggagaggattttcgaggcccggtacggggtggccaaagagctgaaccgtatgggtgccaggatccaggtgcggggacaggaggcctgggtatttggcggggatgtcctggagggtgcctccgtggaggccaaggagctccggggaggagcggccctgatcctggcaggtctggaggcagaaggagagacgttcatcagggaatgccagtatatatggcgggggtacgagaacatctgtgaggacattgcccgtctgggcggtgccatagagaggaaacctggagaaacataactatgaggacatcgaattacaggaaaaaactggacaaaaaaacatggcatacgattatagcggcagcagcgctgactttaataggcggtgttatttttttctttgtgtattttaatgtagaccatgtggaaatacaggagagcagtcattactccaaagaagagatcgaggaaatggttctgcgggggcctctggcttccaattcccttctggcgcctatgctctactccaagaaagtagacggtatgccctttgtggagggctttgaggtaagccaggtgaaccgaaataccattctggtcagcgtgaaggagaagcagcctgtgggctgtatcaagtacctggactgctacatctatttcgaccgctccggcaaggtgattgaaagctctgtggagcgggaccggaaggttccctatttcgacggactggaggttcagtccgtggtcacaggggaagagctgcccatgaaggagacggtgctgaacaccgccgtgagtctggttcgtatttttgagaaaaatgatatgatcccggaccatatcctttttgacgcgcagtatgatatcaccctggaatatggggatatcgcggtacatatgggcaaagacaaatacctggaggacaagatggcacgtcttatcgccattttgccccaggtagaaggcaaaaaggggattctgcacatggagagcgttaccaatgatgtgaagaacattacccttgaagtggaggaagaggaaaaggatacagccgaggacggcgaaggcacccaggatgggactcagacccaggacgggacccagacccaggggacagaccagagcggaacccagggctgggaccagagccagagtggaacccagggctgggaccagagccagagtggaacccagagttgggaacaaagtcagaacggagcccagggctgggaccagagccagaatggaactcagggctgggaccagagccagaacggagcccagagctgggatcaaagtcagaatggaactcaaagctgggatcagagccaaaacggaacccagggctggaatcaggacgggacccaggattggacaggcggccaggatcagtggggctccggcacccaggatcagtggggctctggcacccaggattatggcggcggctacggtactcaggactatacaggaggctacggacagcagaattggaccggagattacgggacatccggccaatggggctattaatcttgagtaaatgccgaaaattcgtgaaaaaagtataaaaaaacaaaattagtggttgataaatcttgaaaaaaaatatatgatatatctatatgtaacctgacagtagtatggatagcagagcaggttagaagtcaggtattgaataaaggaggaagtacattgttagagatcatgacaaatgaggctgaatcatctgcgaagattatcgtcattggtgtgggtggagccggaaataatgctgtaaatagaatggtagaagaggccattggcggagtagagtttgtaggtgttaatacagataagcaggctttaactctctgtaaagctccgactgtacttcagataggtgaaaaagtgacaaagggccttggcgccggcgcacagccggaggttggacagaaggccgctgaagaaagcatagaagaagtaaaacaattgatggaaggcgcagacatggtatttgttacctgcggtatgggcggcggaaccggaaccggagcagctcccgtgatcgcagcggcagccaaggagatggggatcctcaccgtaggcgttgtgacaaagcccttccgttttgaagcaaagacacgtatgaacaatgcacttgccggaatcgagaacctgaagaaggcagtggacacattgatcgttatcccaaatgacaagctgctggagatcgttgaccgccggacaaccatgccggaggctttgagaaaagcagatgaagtacttcagcaggccgtccagggtatcactgacttaattaacctgcctgcattaatcaacctggactttgcagatgtacagacagtaatgactgacaaggggatcgcccacatcggaatcggtgaggccagaggcgacgacaaggcaatggaggccgttcagcaggcggttgccagtcctcttctggagaccaccatcaagggcgctacccacgtgatcatcaatgtatccggtgatatctccctgatggatgccaacgatgcggcaagctatgtacaggagctcacaggagaagatgcaaatatcatctttggtgcgatgtatgatgactccgtggctgactactgcagaattactgtgatcgccaccggacttactgattccgtgtcaaaatccacaccatttggaaatagcagaagcaactcttcaccctttggaatgaagaaacctgcttccacttccaccatgggcggaatgagcatgcctaacttcaatcttccaaatatgaattccggatctccctttacaccgaagcagccgtccagcacggttcagaagaaggacattcagattccggatttcctgagaaacagataggaagctggtgcaggatgggacgagctgtcctggcagggaatggttttgatctatgtattcaaaagagtgtactctctttccaagaggaaagggaatacgctctttttttctatctactctggggttgcagctgcacataggcctacatacccgtcaagcccctcataagtgagggacggggaggtgaagggggtctgcctgttttctcctgcttatttacagttgcattcaaaggtgcagcatttggtctcttcgcagcgacatgcgttggagccgccgatgtcaatggctgctgcagtacacttgcagtcgctgttgtaggtacattcataagccttgcagtcaatgccgatcttctcacagccgcagccagtggcagcattgctgttggtagaagagtccttgcgctcctggaagcttgcacagcaggtctggtcagcctgacgggcctgggatccgtctacagtgatctctcctctggagcagagctcatttttgttatacacacaagtggttgcggagcattttaaaatagtcataataagattcctcctttttgtcatgatatccctagtatgcctccaaaaagtgagaatatgtattgtttttttcggaattttcatggtataataatagatacatgtccccagggccaaaggcacagaaacagccggagaagccaggaggaagacatactacaaagcggttgagagaaggccgcgaaaagaggaagagaggggaattacaatggaaaaaaacagaggcagcttcacaaacaagctgggatttgttctggctgccgcaggctccgcagtgggtctgggaaatttatggagatttccatatctggctgccaaatacggcggcggaatctttttgttagtatatttgattcttgcagttacctttggttttgcgctcatggtcacagagatcgctttgggacgaaaaacccggctgtctgcagtaggtgcttacgaggcgctgaataagaaatttaaatttttaggatatttgtcctgtctggtgccctttatcatcactccctattactgtgtgatcgggggatgggtgctgaaatattttactgtgtttgtcaccaacaatgtggccgaggctgcgggagatgagtttttctcaagctttattgcccagcctgtggcacctgtggtcttttttatcatttatattatccttacggtaggtgtggtagctttaggcgtggaaggcgggattgagaaggccagcaggatcatgatgcctattttgatcgttatgaccatctttatttccattttcagcgtcatccagccgggagctctggagggcgtaaaatattatctccttcctgatttcagccggttcagcgcaaccacggtgctggctgctatggggcagctcttttattccatgtccctggcgatgggtatcatgatcacctatggctcctacatgaagaaggaagcccacctggaaaaatctgtgcgtcagatcgagctctttgacacaggtattgcgtttatggcaggccttatgatcattcctgctgtcttcgccttctccggcggcagcgaggaagctttgggaaaaggtcccggactgatgttcgttaccctgcccaaggtatttggcaatatgaagatgggaacctttgtaggtgcggtgttcttcctgctggtactctttgcagccctcacctcctccatctccctgacggaaactctggtttccattgtaagggacaaatttggctggagcagaaagaaagcctgtattgtgatcatggtgttcctgctggcactgggaatcccggtatctctgggctttgggatctggagcttcattgcgcctatgggaatgagtctgctggacttcttcgatttcctcagcaacagtgtgctgatgcccattgtggccttccttacctgtattttcgtgggatatattgtgaagcctaagatcattgtggacgaggtggagattaacggaacttttaaggccaagaaattttataccggactgattaaatacgtggctccggtatgccttgtggcaattttagtctttgctgttatggaggctcttggaattattgtggtttaaataggagaaactatcagaggaaatggctggggctgtttcctctgatttttttgttattgtggaaagctgttggaattttcctatgtgacatcctccggccgggcattatggtcattgtgcctgttttttcctgcctttggggtggttgacagttattgtggaagaacttataatgaaagtcagatgattaaagagaacaaagacaaaatacataattttgaaatggaggaaggaaatatgttagacgcaaaggttgctgaattattaaatacacaggtgaacaaggaattttattccgcttatttgtacctggattttgcaaattattatgaggaaaaaggtctggacggctttgccaactggtaccaggtgcaggcccaggaggagcgggaccatgccatgctgttttatcagtacctgcacaacaacaatgccaaagtgacattggaggcgatcgacaagccggacaaggtgtttaacggccttatggagcctctcaaggcagggctggaacacgaagagtatgtgacaggcctgatccacaacctgtatgctgcggctgtggaggtgaaggatttcaggaccacccagttcctggactggtttgtgaaggagcagggagaagaagagaccaacgcaaatgatctcattaccaagatggagctcttcggcacagatcccaaaggactgtatctgctggatacagaattaaaggcaagagtttatgctgctccttctttagtactttgataaaaatgggcgctgcagtatctgggtaatggaagatatcactgcagtgaaaaataaaagttccggaacattttacaatgctccggaactttttttgggaaaaaataatttgcaaaaaaaccttgtccatttagacaaggaaatatagaaatactgacccggagcagcagataacatgtgattttgaacagggaattttggagctgctaaatggatttttgagaccgttttttggtactttgcccaagggcgaaaaaacggaaattggactataaattccaaaaaaacccagtaaaatcaagggtttcaggaactctcaagggatactataagaactaaggagggattcttaaaatgagggattgacactgggcggaaacgggtatatattcgaggtacaaagacaatttcattgatcgataatagtaaaattgccgaaaggcagtgacacaaagctaaagggtctaaggtccataaaagactatgacagccagttgccgtactcagaatagattatataggagtatttatacccttctatgtttttttggtatgcgactgtttgctgtgatagcaagcagttttttttgttgtatagaaagttctccggagtttcctatctaacaaaaaccctctggggcatacacgaaatgtgccaaggatagcagcttcgcagctgcgcattggctcacaaagcttccaggtcccttatgagtgagggcatgggggagctgaagagggcttgaaattgggaccagacttggttaaagtactgtgtaccttgaattctttctcgggcttaaaacgaaccctctgctgtaaaagcacaggtggccgaagtcctgtttgagagagtaaagtttatataggcaaggtagaacatgctccccaatggagcataaaaaatccggccctctcagaaacggccggaacaaaagaaaaaacaggtgctgaaatcccatatgggaagcgcctggggattgttacaatttctctatgggaaggtgataccgttggacgaggaaaaagagagaccaaattcttctgaggaagacaaaggcagcgctggcgcaggagcctcaggagaaagtttacataaggcggctgaggtggcaaagctcagcaaggtgatgctcaggcagaagattatgatcggggctctcgcaggagtccttgccgtgggcggaatcggagccgtgggatatcaaagaggctggtttggaaataatcagccggaacaacaggagcagcaagataaggcagtgccggacattgaccccaatgcaggggaatgggatggcaccataccagaggcacccaaaggggatcccaccaatgacagcatctccattccgggatatcccaagatttatattccggccggacagaccaatgtggatgtggctttttccaatccagagggaaatccttgttatttcacctttcagctggtgctgaaggataccggagaggttctctatgaatccaagcaggtgccgccgggagaggccataacaaaggccacactggccagagggctggaagagggagaatatcccgccactttgaagatcacaactgccagtattgtggatctatcccccatgaacggggcgaatatggaaactgttttagatgtaaagtagcaaggagggggtttttatgaaggtccatgaccggagaaaaaaatgtttcccggtcctgctgacaattgcagttattgcagccggtttcccaaacagccgggtaagtgccgatgatatgctgttttccgcagaggatcccgccgtaatccaggtagaggaattggaccagcttttctcagaggaccagccggaaccccaggaaaccccaaaaccaccggcaaaaaccagaatcttcaggaaacgttcccgtaatgtttcctgtcaagataaacaggcgctcgcccaggattccagtgaccatctgagtacagatacagatggaaacaaagaaattcagcatcaggaagaaagcgccagcattccggaagaggagacgcagccatcccctggaccactccaggaggaagaggaacagcagacaccccagccggagcacatcacagaggcggaaccagcagtgagtcaggaaccggagtttacaccaacagggagtgcggtatcggaatctacagtagtattgataccgacacctacaccagtggagacccaggtaccagaacctacagcagtagtgacccaggtaccaaagccgacaccagtagtgacggagataccagagtgtacaccaatagtgacgcaggtaccaaagccgacaccaatagtgacgaagataccggaacccacaccagtggtgacccaggtaccaaagcctacaccagtagtgacggagataccgaagcccacaccagtggagacgcaggtaccgacacctacaccagtggagacggagataccaaagcctacaccagtagtgacggtgataccggagcccacgccagtggtgacccaggtaccgaaacccacaccagtggtgacccaggtaccgaaacccacaccagtggagacccaggtaccagaatctacaccagtagtgacggagataccgaagccaacaccagtggtgacccaagttccagaacttacaccagtagctacgcaggtaccagaacccacaccagtggtgactcagatcccagagcctacgcaggcccctgtgatacaagaaactatagagaaagaagatgagagtcaggagaaggaagaaaaagaagagaaagaggatgtgccggataacggcatagaggatgagaaggtagaaaagccatccggaaatgcgcagttggaagagagaccgacagacaaggaagaagcggaagtacttcctggtgcggattcttcggaaaatcccaaaggggatattacaaaagatgaaaacgtcacaacagagccggaaaacccggacccagaagacagagatgtgacggagggaaatggtcatcctcaagaattaggcggttctgatgttgcagaagagctccctatgaaaaaattaggggaatgtgagaaagaagagaatcagaaactggagctcagcgaagaaaatgagtctgataagctggggaataaagacgaaaaagttaatgaaaaaaaccaagagaacgaatctcaagatgggcagaaagatgcggatatgactaatgaagaaatattatattcaatagatataccttcatcagtattctacaatgagaatagaagatttttatttcatataattcctatacatgacatgggaaatggcgaatttgtagtatcagtaactggtacacaatcccctctaggtaaacactttgcgttatataatggtgattattattgggaatatgaaatcttgtttgatggtcaaattttaaccaatttgaataatcaaataagtttgccctcatttaaaacagaacacatcgtagatattttgccaaaaggggacgtgaggtatgcgggtacttatcaaggatatttgaatttttctgtatgctacaaaacaaataatattgtaaattataagaactgagaaaagataataaaatggaggatataattatgagaagaaatatgatgagtttaggattagctatagtattaactgtaggagctagtttgccagtagcggcttcttctgaagagacgatggataaaactaatgatagtaaaggaacacaaattacatttgtgcaggatgagacatatagtgtatctattcctagtaattttgaaattacggatgtaactgacttgaataatttaggggaaatagaagcgacattgtcggatacaagctatcttgctctaggtgctactgtagatgttacgttagattcgattcaattaaaggtaaataatgaagcaaaaacacaatgggatattaaagcagaggcaaaagcaggttcaaaaaataacttaaattcagataataagtcatatacagttttgcttaaggcggacgcggctccagtatatgcaggtacgtatacaggtacggctcaatttcatataacttatactgctcctactgtgtaaagaagttaagttatggtaatttgattgattaagcaaatggatagaattgtatgatatatttaaaagttcattattgaggtttattattttaagtaagtgtaaaagataaagtgtagagtggcattttgttttttacacttacttttttgaaaattaaagtttgagcaaaaaattaaattttgaatataaagttaaataagtacagtgtctttgcgaaataaagggagtaatgaattcttctagaagaatgaggattttgtattttggggaagatatatattgcaggtgtagagacattttaacaaaccctgctggcaggacttaaacccgctagaaccggatttggggagatgtattcttatctattttatataatcagcttaaggcagagttgacgatatatcggacgttacgttggaaaagagagcttgatgctttttttgcagatgatagtatgcccgagataccttttgctaagcggtaaaagcagaaaaaactttttatttcactggatctgttgaattttccataatatctacattgcatttggttcgtacttcagttccatcagaacaatgaatgccatgcacaaggtgatataaaaattagatgcattgattgcacaaagcttccgtatacgaaagttttcaaactgaaatatctgtttttttacagcggaaatattgtttgatcttccatcagaaaaactagctacgtgctacacggatgacatattctttttaacggattttttattagtggcaagcatcattggatgctatgagatacaataaatggtgacaagataaatattttttctacatgcggtaacctggactttcacacgggaaaggcacacgtcatgctccttccttttatagaggtcgcaggcatttaccttgcctttacaacggttatgaagttctgtcataggtgtgcttttattatggacaaaaaaacagcacgcaaaattctattgaaaataaaacaataaaagtgaaaaaataaagcaaaaaaatcttgacacccgccccatttcgtgatattgttaaccagtacgcgaaagaaaaagaaagcagagttatccactctcaccttagcgcagaggcgactaatggtttatattgcaggcggtatcacaagaaaagtgtgcccatagattgtaatagtgtggatagtctgtccgcacttatttttttgcatagaactttttgagggtgacgaaggtcattgagttatcatagtatggaggtgcactactattagcggtttacaaattaatgagcagatcagagacaaggaagtaagattggttggttctgacggaacgcagcttggcataatgtcagcaaaagatgcaatggtgaaggcacaggaagcaggtttggatttggtgaagattgcaccccaggcgaaacctcctgtatgtaaaattattgattatggcaaatatcactatgaactggtgagaaaagaaaaagaagccaagaaaaagcagaaaaccattgatgtgaaagaagtgcgtctttctccaaacattgataccaatgatttgatgacgaaagtaaatgccgcaaggaagttcatcaccaagggagataaagtaaaggttactctgcgcttcaggggtcgtgaaatggctcatatgggaagcagcagacatgttctggatgattttgcgaagcatcttgcagatgtggcaaccgtagagaaagctccgaaggttgaaggcagaagcatgaccatgtttttaactgaaaaacgttaaaatagattttgtaaagattaaggaggaaaatacaatgccaaaaattaaaacatgtagagcagcagcgaaacgtttcaaaaaaacaggtacaggaaaattagttagaaataaagcttacaagagccatatcttgactaagaaatctcagaagagaaaaagaaatcttagaaaatctactgttgttgattctaccaatgtaaagaacatcaggaaatccttaccatatttataagatagagaagaaagaacaggaggaaaatgagaaatggcaagaattaaaggcggtttaaacgctaaaaagagacataatcgtacattaaaactggcaaaaggttatagaggagccagatccaaacagtatagaatcgcaaaacagtctgtaatgagagcgcttaccagtgcatacgctggaagaaagcagaagaaacgtcagttcagacagctctggatcgcacgtatcaacgctgcagccagaatgaacggcttatcctacagcaaaatgatgcacggtctgaaggttgccaatgttgacatcaacagaaagatgctggcagacatggcagtgaatgacgcagaaagcttcaaagctttagctgagattgcaaagaaagcattcgcataatagattttatcatataaagaataaaagaacagctccgtgggaactttccttcggagctttttacatttgaaatatacttgaaatgggttttatggattttctaaaacggatttttaaatccctggctgattttacaagataaagataaaaattccatgaaaattatattaaataaatcttgcaatcaaaaaataaaaatggtataatcacaacattaaagtattagtgaataaaagttatgtggatagccaaagccggcgcgggtgaccagccggctttttacctacatagcgaagcccctaccttttttccagaggcagggggaagaaagaagatttaaggaggagagaattatgacaaaatggaaaaaggtacttagcgttgcagcagcagtgagtatgacagcatcaatgatgagcgtgccagcaatggcagcagatgataccctgaaattaggcggtatcggaccactcacaggagagaccgcagtttacggagaagcagtcaagaacggggcacagatcgccattgacgagatcaatgcagccggcggcgccaacggcattcagctggagatgaacttccaggatgatgagaacgacgcagaaaaagcagtgaacgcatacaacacccttatggactggggtatgcagatgctcatcggaactgtaacctccaccccttgtgtggctgttgcaaatgagagcgtaaacgacaatattttccagctcactccatccggctcagccgtagagtgtgttgccaaccccaacgtattccgtgtatgcttctctgacccagatcagggttctgcatctgcaaaatacattggcgagcacaagctggcttccaaggtagctgtgatttacgacagctccagtgtatattcttctggtatttaccagaaatttgcagaggaagctgcaaaccagggaatcgagatcgtagctgcagaagcgtttaccgctgacagcaacaaggacttctctgtacagcttcagaaagcaaaagatgcaggggcagagttagtgttccttcctatctattatacagaagcttccctgatccttacccaggctgacagcatgggatttgagcccatgttcttcggatgtgacggtatggacggtatcctgaacgtggagaaattcgacacttctctggcagaggacctgatgcttctgacaccgtttgcagcagatgctacagatgagctcacccagggctttgtaaaagcatacgaagaagcatacacagatactcccaatcagtttgcagcagattcctatgacgctgtttatgcgatcaaagcagctgttgagaaagctgggatcaccgcagacatggacggctccgatatttgtgaagcaatgaagacagccatgacagaggttactctggacggtgtgactggtactggtattacctggtctgctgaaggcgagcctacgaaagacccgaaagcagttgtgatcaaggatggcgtatataccgctatggagtaatcctgcagccggagtaaaataaacacagcatgaaaagggagaggctgcctgaaacataggcagtctctcgtttttgtatagtaggaaagtatttttttgaaaatagggacttctgtaatttcctaatatacaaaaattcagagaagcttttcaagaaaagaaaggatgttactatgagttttttgtcatatctcattaatggaatcagcctgggcagcgtgtatgccatcattgcccttggctataccatggtttatggtattgctaaaatgctgaattttgcccatggagatgtcattatggtaggtgcgttcacggtatttgtatctgtgaacagcatgggacttcccggatggctgggaatcctcttatccgtggtagtgtgcactgtattgggaattgtcattgagggagtggcctaccggcctctgcgtaacgcagcctctcctctggctgttctgatcacggccatcggcgtcagctatcttcttcaaaaccttgcactgatcatgttcggtgcaaacacaaaatcctttacctcagtggtacatatcaaagccctgaagctggcagggggcaaggtagtcatatcaggggagaccatggtgaccatcctggcctgtatcctgatcatggtaggcctgatgctctttattaaaaagaccaaaaccggccaggcaatgctggcagtttctgaggacaagggtgccgcccagcttatgggcatcaatgtgaacaaaaccatttccatcacctttgccattggttctgccctggcagccattgctggagttcttctgtgttctgcttatccctccctgactccttacacaggagccatgcctgggatcaaggctttcgtggcagcggtgttcggcggcattgggtccatcccgggcgctttcctgggaggaattctccttggaattatcgagattttcggaaaagcatatatttcttcccaaatggcggacgcgattgtgttcggcgtgctgatcattgttctccttgtgaaaccgacaggtattttgggagtcaatattcaggagaaagtgtaggtgccatagatgaaaacaaagaataagaaattaacaagcaacttgatcacatatggaattgtgatcgtggcctatcttgtggtaacggcaatgcagtcagcggggatgatctcccgtctgctcagcggacttttggttcctctgtgcgtgtacgtgatcctggccgtgtctttgaaccttacagttggtattttgggagagctgagccttggtcacgcgggctttatgtgcgtgggcgcttttgcgggagcggttttctccaaattcaccatggataccatcaccattcccggtctgcggtttttcctggctattcttgtgggagctgcctttgcagggctgttcggcctcatcatcgggattccggtgctccgcctgaagggggattatctggccattgtgaccctggcctttggggagatcatcaagaacgtggtgaacctgatctatttaggcgtggactccacaggcgtgaagctttccatgaaggactatatgtccatggggatggagccgggaggcaaggtgatcatcaacggcgctcagggtataacgggaacgcctcatgactccacctttaccattggtgtgattctgatcttagtaaccttatttattgtgctgaacctgattaattccagggacggccgtgccattatggctatccgtgacaaccgcatcgcggcagagtccattggcatcaatgtgtcaaagtacaaattaaaagcatttgccatctcagccgcccttgcaggtgtggcaggcgtgctctatgctcataacctggcaacgctcacagcccttcccaagaactttggatacaatatgtccatcaccattctggtatttgtggttctgggagggatcggaaatatccggggctccatcattgcggcagtggtccttaccctgcttccggagatgttaagaggcttaagtgaataccgtatgctgttctacgccatcgtgctcatcattatgatgctcatcaactggagtcccaaggccattgaatggcgggagcgttttatggcacagcataagagaaaaccaaggaaggaggcataaacatggcattgttggatgttaagcatttaagtatttccttcggcggacttcatgcagtggatgattttaacgtgaccattgaaaagggtcagctctacggtctcattggaccaaacggagcgggaaagaccacggtttttaaccttctcaccggggtttataagcccgatgagggcattatcagtctggacggtgtgaacattaccggaaggaaaaatattgagatcaataaagcaggagttgccagaacctttcaaaatatccgccttttcggggcgatgtcggttctggataatgtaaaggcaggactccacaaccaggaatcctacggtactctcaccggaatcctgcgtctgcccaagtattataagacagagaaaaagatggatgaggaagccatgcggcttctaaaggtgtttgacctggatcgggaggcggacgtgaaggcctccaaccttccctatggaaaacagagaaagctggagattgccagggccttagccaccaatcccaagcttctgctgctggatgagccggcggcaggcatgaaccccaatgaaaccgaagagttgatgaaaaccatcagttttgtgagagatgaatttcagatgacgattcttctgattgaacatgatatgaagctggtttccggaatctgcgaggagcttaccgtgctgaactttggccgggttctggcccagggagagaccgcagaggttctccataacccgcaggtgatcaaggcatatctgggagagtaggaggaagaaaaatggcattattggaagtaaaggatattcaggtatattatggaatgatacaggccttaaagggagtcacctttcaggtaaatgagggagaggtcattgccctcatcggcgccaacggtgcgggaaaaaccactactcttcacaccatcaccggcctgctccggtccaagactgggcagatcgtctttgacggaaaggacatcagcaaggttcctccccacaagatcgttaccatgggcatggcccatgtgcctgagggacggcgcgtttttgccaacatgtccgtgcttcagaatctgaagatgggtgcttacaccagaacggacagcaaggagatagaggaaacgcttcagaaggtgtataagagattccctcgtctggaggaaaggcagaatcaggcagcaggcaccttaagcggcggggaacagcagatgctggccatgggccgggcgctcatgtcaaagcccaggatcattcttatggatgaaccgtccatgggactttctcccatttttgtaaatgaaatttttgatattataaaagaagtcagtgagagcggtaccacggtgcttttggttgaacagaacgccaagaaggccctttctattgcagacagaggatatgtgcttgagacaggaaaggtcgttctggaaggaaaagccatggagctgctcaatgatgaatctgtgcagaaggcttatctgggagagtaagagaaggaggggatacaatgaagaattttgtgattaccattgccagacagtatggaagcggcggccgtacagtgggtgagatgctggccaacaagctggggatcgcctactacgacaaggatatcatccgcatggcctcagatgagagcggaatcaacgagaggcttttcggaaacgtggatgagcatgcgacaggcagaccgtcactgttttccaaggcaaaaagtctttataagggagagccgctttataaaggggaggtgctcccgcctcagagcaaggagttcacgtctgaggaaaatctgttcaacattcaggcccagaccattaaaatgctggcagaaaaggaatcctgcgtgatcattggacggtgctccaattacgttctgcgggattacccaaatgtactcagcgtatttattcatgcatcccatgaataccgtatgcaggaggctgccaagaagctgagcatgaacaccagagagctggagaagttcttaaaagaggatgacaagcgcaaatgcgagttttccaaacggttcaccggaagagagtggaccgatgccagaggctacgacctgtgcctggacagcagcaagctgggctatgaccggtgtgtagaggagatcgaggcgcatttgaagctgcgcatgagagaggaataggaagccaatttgagggggcttactatgagagtggattattgaaagatatagcgtgaaaagagggggaggaatttccggtgacggaaattcctccctccaattatttggcaataaatgaataggtggggctgtacaggccgttgattcgggttttgcctgaaatctggtaggcccttactttaaagtaatatttcttgcctttggtaagtccggtgacgatcttggctgtttttgtacggccggagatgtagtagctggatgtgtctccagtgaatttctggtttgttcccacaatgagatagtagcctgctgcgctggcggcggctctccagcttacctgcagttttccccctgtggagattcgggcttttacaccagttatggcagcggggcggatgtaaaaatatttggctcccttgcctgtgaaattgcctttgccagtgaagatgatggcggcctttcctgtcagcttgttgttttggtaggaaatggtgtaatctttatttcttactaaagtcttatttccgtactttaaggcaggagtaggacaaatgttttttccagtgtatacctgcacaggtacggaggcaaccttacatttggtgatactaattttggatgaggaagctttcattacacggaaggcatatgggcggttggagtaggttccagaaggaattactttcacgcaataataacctgccggaagagttacgtaaccagaataaagctgtgtgtcactgcccttgctgtttaagtaggtataggtcttgctttctgtttcattccttagctgtatctgccagtggcgttcataatcgttcataactccatggcggaaagaaagccgtacctttgtggaggcagtcagccggaatttgaagtaatcaatgtcttggttgtaggctaaggttccgtaatagtctttgttcagtgatatcacatttgattctgatctggtattgtttttttccttctcccagttggatacaggggtgtagtttaccctcagactatacttggcggaggtgaattttgcatcctgacggaccaccgctgtataatatcctgcgggaagccccagatagccgcttgcagaggaggtggcatcaccacggatccgcagaggagtcagcaggtaggagccggtgttcccatagggggagatgtataccttccagtatcggtcatatccgctgatcccattttgcttaaaggacagattgacttttcctggtgaatttaggcggaagtgatagtaattgatggtgccagatcctccaagagaatccgtgtaccaagtattggggttaatggtcttggtggaagccttgacacagaaagtcattcccacagttagcaggagaaaagctgccagtgacaacagtagtttgcggtaattctttttcatagtactccctcctttggataatgggataatataggattattgcttcgacagcagttccttaggattccctaggactgccgtgtgctattgaggttggaaagaagggatgccgcagcccctcttctagatacccttattttaccacgcagccgcagcagtgtaaatgaaagccaagggaatgtaacatctttttttccggggcatatactggaaagaacaattctttcaggcggtggatatggagagaaggaaaggcacagccctgctggctattctttttctgggagcagtgattctatggagccggacggaaagctaccgcgccctatgcgcttcctctttgaatctgacttcagagggagaacctcccaaggtggcgctcacctttgatgacgggcccagtgcggagtatacgcccaagctgctggacggactgaaacagcggggggtgcatgccactttttttcttatgggaaaaagtattgagggcaaggaagagattgtaaagcgtatgagtgaagaaggccatttaatcggaaatcatacatatagtcatgtgcagctttcacagatatctcagcagaaagcaaaagaggagattgagaagaccagcaacctgatctatgagatcacaggtgattacccagtgtatctgcgtccgccctttgggggctggaaaaaggatctggagttttctgtaaccatgatcccggtgttctggaccatagatacgctggactggaaaagccagaatgtgacggccattatggataaggtgaagggaaaggtggaggatggatccattattctcatgcacgatgaatattccacctctgtgcaggcagccatggatattgtggaccttcttcaaggggagggatatgagtttgtgaccgtggatgaactgctgaatgattgataggatgggaaggggaaacagtaatctgaaaatcctttcgcacttgtttaagggccatatcccgccaggtgtcctggaaagaatctgttgtttgtttttttggaatagacaaagatactgcaaactggagatatacttatctggccggatgaaatataatagacttaaatatataagcagatatacaaatttgtaaaccatatgtgttatctttacccgactgctgctttggtatcccggagaatggtttgagagcggataagagcattacaaaaatagaaaagggaggggaaggtgtttaagattctgtaattgagattctgggaacatcatacaggaatattatgaatacggagaaaaagctggctgtactttcaaagattgcggagaaattaaacggtgaaaatgtcacctgggctgtgggagcctcgctgctcttatattttaaagggaaaacagatcactttaatgatattgatctcatggttatggaagaggacattccgaaattgaaaagagtattcttatcaatgggagcacttttgccgtctgaacttaatgatcagtataggacaaggtgtttcctggaatttgtgattgaagatgtagaggtagacgtgatggctggattgattcttgtaaataaccacaaggaatatgactgttctttaagaaaagaagagattaaggaatgggttaccgttcattctcaaaaagtgcctcttcattccctggagcggtggaagcggtattatgaacttatggggagaaaggagaaggcagaaatgatcagcaaagaatctgccgcgaaaatttgagactttttgcaaaggtaaataaccgaatacaaaatggggaataaggggagtacagatgtattatccaagacaaataccgcagctattaaatgaagcatatggaaaacatctcacatattgtgaatatcaaataaaggaattgcaagagtatgtgatgtgtatctggcacatcacttcaaaaaaggaactgacagcgcctatttccaataccgtgctgcctgacggatgtattgatttgatcgtggacttaaacaggcagaccatgtatttttctggtttcagtaaaaatacggagacggtaaccttggcaggaaatgtcaatcttatgggcgtccgttttaaaccaggggcaatttatagtctgttccatattaatggggacaaagtgatggatgaaatggtggaattttctcagatagaacggcaccgtgatctgtctgcgatctacagggaaacggatgtgtccgggcagataggcatggtgactgattatctgctgactaaaataccgggagcaaaggatacccactatattcagcttgtggattctatctatcagaagcccaccaatcagtatgtccgtgacattgggggagttttgggctatgaaagccggcagcttcagcgggtctttctgaaacattatggcgtatcccccaaggtattgctgaatattctgcgccttcataaatgtatggagctattatttgatagaaaccacagcctgcagcaggctgctcttgacagtggcttctatgatcaggcacattttataagagagatgaaaagatatacgggtatccagcctactttacttttgaagaaatacaaacaataatgtccgttttatacaatacatacgtctggtgggtttttataatatacccaaacaggagaggagaagggtatatgtataagacaataacaactaatattatggtggagagtgtgaaagaaaccttggcgttctatgaggaaaaattaggttttacgacggttgtcacagttcccgatgacgcttttgactttaactttgccattattgccaaagacgagatttcaatcatgtttcaatccaaagcatcgttaattgaggaatatccaagcttacagacagatacaataaaagccatgttcacattatttataaccgttgatgatgtgaaggcactttatgaagaattaaaagaaaagacagaggttgtggcagaattgcaccaaacattttatggaaaagaggagtttgcgatatttgacaacaaccacaatatacttacaatctcatcccaggaatagaagccataggcgcaacagggaattacaccggacgctattgatacagcgcccggtatttttttgcgggaacccccacctcttttttgaacacccggcagaagtagttgtaatccgtaaagcctgtcttggctgccacatcgctgatggtcagcttggtatttttcagaagctccttggctttttcaagacggcggttttttatatattgggcaatgccaaggcccagatatttctcacaggtggagtagagcttgcttctgctgatggaaaaatcagcggcgatctgttcaacggtgagctcctcccataaatgctcgtccagataggcgttcagattttccacgaaattctggcgctttgcggacattaaatgctttagcagcacgtaaaaggtacaggcctccagaatcttggctgtggcatagatctgctccgtggttttgcgttcaatggccagcagctcttgggcagatgccttaggggtaatgtgattttcccggaggttcttttcaatgagagccagcagctccgtatcatccttggtgtcagtgatctggccgaacataagataacctaccaaaatcccgttgtccatcaaaggggcgcaggcttcgatgagtcccgcatgacagtggtacaccagaatttgagaggtctttttgcagtgtaaaaaggattttaggttgttttccacacactttttcaggcagtcaggatggctcctgagggtgtgacagtaggtgcagtgggagtccggataagagatcacttcttcatagtctgtgtcaaatactacaattttaattcctgtgaggagatagaaatcccttagaagtgcttccagctcctgggtatttaaatgggcgatcaacagggacgcctcctttccggcatagcaaaaaccctccgggggatgcaaaaaagctgcttcgcagcagcacattggcccacaaagctgccaagccctttatgagtgagggaatgaggagttgaagcgggcttgccctctttgttatgcccttttcttcatcataccaacaaaaatagaaatggtaaataagttttttgaaaaagataaatttacagtttttaaaacatgaatcactatccaccacaagaaaaaaaggatatgataagaatagaaatcaaagatatctgtgagaaaattcaaagaacataaggagtagaaaggagactgcatacaatgagatttgcactttattttggaaaccgggggtttatgcctgcccagctcatcgaaggggccagggaggacatggtgaaggcagtgtcagacgcaggctatgagtatttgatcatggacaaggaaaccaccaggtacggggccgtggagacaagagaggagggaaggctgtatgccaaatggctgaagtcccatcaaggggaatacgacggagtgatcctatgcatgcctattttcgtggatgagaacggcgctatcacagcccttcaggatgcgggagtgcccgttttgatgcaggcctatccggacgagatcggcaagatggattttgcccaccgccgggatgccttctgcggaaaattctctgtgacagatgtgtttgagcagtatcaggtgccctacactgtgctcacgccccatgtggtgcatcctttaagtcctgcctttgcccagaatctccatgattttgccgccatctgccgggtggtgaacggaatgaagcgctgtaccattggctgtattggagccaggaccactgcctttaagactgtgcgctttgacgaggtgaccatgcagcgccatggcattaatgtggaatcctttgacctgtccgagctatttgagcttgtccgggcaaaagatgaccaggatcccagggtactggataagaaggaagcgctggaaaaatatacagatttttcccaggttccccaggacaagaagcttactttggcaaaaatcagtgttgtcattgacgaatacatagaggcgtatcacttagatgccgtgtctcttcgctgctggaacgagatggagacgtacctgcgggtatgtccctgtgtgctcattagcgagctgaatgacagaggcattgtggcctcctgtgagattgacatgtgctccgccatcaccatgcgggccctgcagcttgccacccagggtcccgctgcctgtctggactggaataataattatggagaggacccggacaaggtgattcttttccactgtggctccacggcccagaagctaatgaaagagacggggcatgtgacagcccacaagatgttcgaaaaaggtgacccgggaagcggctggggaaccaatgagggccgcatcggcgccttccctatgaccttttccaactgcaagacagaaaatggaaagatcaccatttacttcagtgaaggtgaatttacccaggacgagattgaggacagcttctttggctgcgggggcgtggcttatattccggatctgcagaacaagcttatccgtctggcccggggaggcttcaaacatcataccaccgtgggggcaggccatgtgaagaacattctggaggaggcttttaagtactatctgggttatgacgtggtttccatagattcgcgtgaaggtttctgatcacagtgattatggaagtaccttgcaattgaaaatgaaatgtttctttgacaggaggtagaaatggcgttagcaggacttgacatcgggacgacagggtgcaagatctctgtctatgataatgagggaaattataaatttggctcctactgtgactatccggtgatccgcaggaccaaggagcatcaggtgcgggcagaggccatctgggaaggtgtgaagaaggttctgggggatgcggggagaaactgtccggacctggaggccatcggtgtctccagctttggggaatgctgtgtgtttctggatgaaaaggaccagccagtccgctcctgtatgctgtacacagaccccaggggaacacaggaatgcagggaccttacgcaggctctgggcaaggaaaagattcagaagatcaccggagtgaatccacacagtatgtatagcatgcccaagcttatgtggatcatgaaaaaccgcccggaggactataaaaagacaaagcgcattctcatgatggaggagtttgtcatttacatgctcacaggaaaccgggcgctggattattccctggcagccaggaccatggcctttgacatcgaacagcttacctggagccgggagatcttccaggcggcaggtgttgatcaggagctctttacaaagccagtgctcagtggaacctacgcagggaccatccggaaaagtctggcccaggagttgggaatttcggagaaaactgtggtggttcccgcaggccatgaccaggtgacggctgctatgggctccggcgtttttgacgcggactgtgcagtggacggagcgggaacagtggaatgcatcactccggtctttgacggcattccccaaggagaagaattgtatgaaggaaattacggggtgatcccctatgtgatccccggtaaatatgtgacctatgccttttcctttacaggcggggctctggtggcctggtatattgacaatctggccaagtgggagaagagccttgccagggaacagggccggtcggtctatgagctgctggaggagggcatgcaggaggaacccacagggattctggtccttccccattttgccggggcagggaccccctatatggatgaaggctccatgggagccattgtaggcttaaacgtggagcatacggcctcggatctgtaccgggccatgatggaaggggttgcctatgaaatgatggtgaacctggagtggctggccagagcagggatcgcacctaaaaagctgcgggcaacaggaggcggtgcggcttctaagctgtggatgcagatgaaggcggacattttcaaccttcccattgtatctttggggaattctgaggcaggtgccgtgggctgcgccatggcagcaggaaaaaccgttggcagattcaaagatctgaaggaagcggccagtgtgtttcttaaggaaaaggacgtgtatgagccaaggcaggcctctcaccaggcctatatggaacactatgaaaaatacagagaactttacaaagctgtcaggcctttggtatagggcttccgggaaaggagcgtgcaaaatgaaggagtatattggacatgaaagccagattttaggggtagaggaacaccgcctggttggaggaaaaggagacgggatgcggctgctgcaggtgagaaacggcctgggtatggaatttacagtttctgtggaccggtgtgcggatatatccagactttcctacagaggaagaaatctggggtatttttcaccctgtgggtatgtggctccctcctattacgatgacaaaggagatggatttttgaaatcctttaccgcaggatttcttaccacctgcgggctgaatgctgtagggacgccctgtgaggatgaaggagagctgcttccccttcatggcaccattggaaataccccggcggagcagatttactgggaaatagaccaggagaagatcgtgatctctgccaagattccggacgaggggatttttgccaggaagctgcttttgaacagaaagattttctgctctctcataaaaaatgagatcaccatccaggacaccgttgaaaaccggggcgatggggagactccggtgctgcttctgtatcatatgaatatgggctatccccttctgtcggagaagtccaggctgtatatcccttctgtgaaaacccttcccagaaatgcccgggcggctgaagggctggaccagtggcaggtggtggaaaagccgcagccctgctttgaagagcagtgctattatcacagctttcataaggaaggccgggccggcatcttcaacccggacctgggacaggggctgctcatcacctttgatcctaagaagctgcccttctttacccagtggaagatgatgggagtccgggattatgtcatgggcctggagcctggaaactgtacgcctgatggaagagacaagatgcggcagcagggcagccttacggttctaaagcccggggaaacggtttcttatgaggtgaaggtggccatggttgagagccaggcccagtgggaagagatcaccggataagacgcataagaagaggacaggcccaagaggacctgtcctgtatgtggtatcctacagcgaaatgaagctgccaacatcaggtgctgtagacgagaattccggtcagtcttttttgtaggtaagacttccgtctgcaatgttaatattggtttctgcatatccagggcctgcgcccacggctttacagccgccgatagcagttacatgggcaccgggaaggatggagacgttgctgcagtcacggatattgccgattaccggtacagatggattgtctgtagcggctgttatggtcccacttttaataatgatgttattgccaaggatagcaggggattggccagagtgtacatccagcgatccatttccctggatggtgaacgtgcaggaagcgtcgctgtatgtcaacttaatcccgttcttcacgtctcggatggaatttcttgaaccttccataagctctaatgtgaggcttccgttctcacggctggaaatccaaagttctcctatattcgcacctgcaagtatgagacgaaagcctggggtatgggggtctacaaacatcacattgcttctgtccggattactttggacaatggtgcagccagttttgggattgtaagggtactgattttttcccagctgtgcaaagtatcctttggactcatcgatggagatgataccctcagaaatatccagccaagtgccttctgtgacggttaactgacacttccccactgcgttgtaggctttggcgctgatttcggcaaagccgggccgatggccgtgaatggttccatcctgtgtgacagaagccacggcaggattgctggaggaccaggtaagggtatccgtggaattcaggggcagaagataggtgtcaagcttaaggctctccccgttctgcatgaatacacgattgtttgaccagccttcaaattttacggatgtggcatggaggctgttatatacgtagatccggcaagtggcatagaccttggcagaagttttggctgtgatcacagtgttgccttctttttttgcagtcaccttgccgctggacgtgactgtggctacgctggtattgctgctgctccaggtaaccttgtcagctgccttggcgggactttgggtataggtgagctggaatgttttccctttttccatatcaacagtggttttatttaatttgatggctgtggctttggggggtgtcaccgtaattttacaggaggcttttttccggttcccggtggatgcggtgatggtaacagttcctgctttcttggcggtcaccttccctgaggagttcacagaagcgatggcggagttggtggtgctccaggtgaccttggacatggcgcccttgggaagcaaggtggtggagagctgcaaggtttttcctatgaccagggaggctttggtcttgttcagctttacgctggagggcaaaggggccacggtcacggtgcatttggcagagattttcgaggttacctttgcggttatcactgcttttcctgcttttttggcggaaaccgtgccgcttgcgttcacagtggccacagatggattgctgctgctccaggtgactttgccggaggcgccggcgggagagatggtggcagtgagcttttgattggcaccctgggccagggttactttcgtcttgttgatttttacaccacttgcggccggcttttttacagtgactgtgcaggtggcacgaagtccgtcatctgtcacggcagtgatggtggcagtgccgtatgccttgcctgtgacctttccctgccgatccacagtggctacctttgtgttggaggaggtgaagcgcaggttgctggcatagcgggaatagttgccggagggagtggtggccaggctgaaaacagctgtgccgttcaggcctacggtcatggaggttttaactgcccgaagtgcggtcaatggctgaacgacccggaatcgatgagggttatccatcagctgcacatccataagtataccgttgaaataatagttagagatcgtggttgcatttactgtacaggttcctggacggacggcccggatcagacagttgatgcggttggtaggaccgactaattggatgattgacgggttgctgctggtccactgggtttccacgataaggtcataaaccccggcagcaggtcccaggccgatctgttttcccacagtgatcagacggtttccatctttgtctatggggtggccgccccagaacaggactttttcctcatccgcagcctggacctgcacggaactgccgggatgcagctccatagccagaacggctaaaagcatgcacaggacaagggagagaaagtgaaggacagggtttgatacaaattttcttcttcgtttcatgagatttttcgctcctttctaataaggttgacggttacaccttgacgcaggttcgaaaaatgctggaaaagtgtgtggaacataggctgggcggcatttctgaaaccatcattgatactttcattttaactgtattgtaccgggtttgcaaatgctatttcgatatttgttaagaaagaaaagcagcggatggacggatgtaatttatgatttttgtaaatctgtcacaagaaaagatggttttgtgatataatgaatgtgttccatgggcaggtggtccgcaagattatggacggatatcagaaaatttggaaatattacaggagatatgggtaaatcataaaaataaattcataaaaataaattccaaaagggggatacagttatgttagtaacattaaaagaaatcttaaaaattgcagaggaaaagcagattgccgtgggagcctttaacactcccaattttgagagtctccaggcgattctgggagctgctcaggagcttgcgcttccggtgatcatccagtatgcacagtgtcatgagaattacaatcatctggaggacatgggacctttgatggtggaatatgccaagaaagctactgttcccgtatgtgtacatctggaccatggcgagacctttgagtatttggaggcggctctgaacatgggcttcacaggcattatgtacgacggctctgtgcttccttatgaggaaaatgtggccaacaccaagaaggccgtggagctggctgcaaagaccggggccggtgtggaggctgagctgggaagcatgggacgcagagaatctggagccggtgacaattccggagcccaggatgagacgaagatctataccgacccggatcaggccaaagcttttgtggctgagacaggcatcgatgcccttgcctgttcctttggaaccacccatggcatttatctcacagagccccgcctggacttcacggttgtggaaaatgtaagaacccagacggaaggcgttccggttgtgatgcacggaggctctggtgtgagcaaagaagatttccatgcagcgatcaaggccggagtgagaaagatcaactattttacatatatggacaaggctgcgggaaatgccattgcccagtacgtgaaaggtttaaaagagggacagcctgctttctatgcagacgccaccttgctggcaatccaggcaatgaaagaaaatgtgaaggatgccatgaaaacctttgcacttatggactaagaacagggggatacctggtctaagaaaaaatccacttgacggaaactcagtcaagtggattttgttcttgccaaggaaagctgcctcccagccgcatattggcgcacaaggccgccaagccccgcataagtgagggggagtgggcgttgtagaggggcttgcccgttttgttatttattttcatagtatcgtaaatttttggcttttccttttttgatcagcataccgtgataggtcatctctcgtagaagcagaattgccgtagattgtgatacaccaagtgccatttctacatcgctgcggacaatagaaccttgcctgcggcacagttccaaaatagcattcgttcgttcttctttttttgccacactggtagaaacggacagtttaggagagtggggagatttctgttcttctgcgtggaagttggtattgggaagcgtgatcttaaaagcattatatgatgtttggatcacaggtttcacagcataatcatcgtagcactcattaattttaagaattcctgtgccatatgcctcgatcagccgcagacgatagaagatattcgctaaatgctgattacgtaatacagacacccccagcttcacgtcatccaatgtaatacctttcaccaaaccaccaatcgttacaaattcaattctgtcttcaaaaatactgatgagagtagcgccgctgaaggaatagtctcgatggacgatagcgttcaatagtgcctcacgaattgcctccggaggatagtctcgcatatctaatcggtccagtccagagaattccgcccgggtacgattgtaacgatcaatataatcgtaggtttcctccagctgttccagaagggaacctgacaattctttgcggtctatgaatacagatttcttgcagccttcaaaaacggccagtctaatcatatgtgtacactgctcagacagcaggaatgccagattcgtgtacatattatcctcgccaattaggtgcagggtacgcatttgggtttttccgaactctacctttcgttttttgaaaaaatcggaagcctttttaaaagtaaggtcctgattaagggaacgggcagcttcatagctgtcgccagcggtttctttaatcatatttagaatagcggcatctgttgccggaactgtggatgccccctgacgaacataaacaccttccgggcgaattccttttccatggagataatacggtcttgctgtaccacgctggacagttatacatacaatagacttttcgtccatgacatcgttgcgacactccacaaacatggtaatgtctgggcgcacggcatctctgatcgcattggttacacgcaacatagttccatcaacattgtcaacgccacaaacggttccatcatcgttcactccgatatagagcgtaccgccgtcacagtttgcaaatgcaataattgtgtttttgatatcgtcaacgtattctcttttgaattcagtcgtcttgttttctgtgaacattgaacatcctccaatcaattgaaatcctaatctaataattattataatcattttttttattatttacaagtagaatctgaatgattgtgagaatatggaatttttttctttattattgtggggctgatcatacggggcaaacagtagaaaaatttataagtctgtgctatactctgataaaatccaaaaaacaaataaaaatgatggaggtaagaaaagtgagtgttcattcaatcgatgcagaagaggatccatttgcataccgctatgatgtacagttattaattgacagaagagatgaggatctagacgaagataagatcgcagaatacattacagataatatggaaggaaatagcttgatggcagcgggtgacgaggatttggtgaaaatacattttcatacgaataagccatggactgtgcttgagtactgtaatacggttggagagatctatgacattgtaattgaggatatgataagacaatctcagggacgtcaggggtgatcgctgcttacaaaaaccgttggagtgattgcaaacaaatgttccttgtggtaaagtataaaaagagatgagaacatgccgctgttccctctgagctgctgcgtaggcagtgaataaggaaccctctggggacagccgcttattgaaaaagacaggagcatacttatggatttgtttgaatacgccaaaacgaaaaccctggaccgggaatctcctctggcctccagactccggcccaaaaccctggaggaggtggtgggtcaggagcacattgtggggaaggacaagctgctctaccgggccatcaaagcagacaagctcacttccgtgatcttctatggccctcccggaaccggcaagaccactctggccaaggtcattgccaatactaccagcgccaattttacccagatcaatgctaccgtagcagggaaaaaggacatggaggaggtggtgaaggcggcccagaacagtctgggaatgtacgccaagaagaccattttatttattgatgagatccatcgtttcaacaagggccagcaggactacctccttccctttgtggaggacggcaccattgtattaattggagccaccacagaaaatccttatttcgaggtgaacggcgcacttttgtcccggtccattatttttgagctgaagcctctgtctgtggacaatatccgcaccctgatccttcgggctgtccaggataaggaaaagggaatgggtacctacgacgctctggtggagcccgatgccctggaatttctcagtgacattgccggaggggacgcccggtctgctttaaatgccattgagcttgccgtgctcaccacccccagaagccaggacgggaagatctatatcaccctggatgtggcttctgagtgtatccagaagcgggtggtgcgctatgacaaaaagggagacaaccattatgacattatctcagcttttattaaaagcatgagaggctcagatccagatgcagccgtttattatctggcaaaaatgctctacgcaggggaggatgtaaaattcattgcaagaagaatgatgatcctggcctccgaggacattggcaatgcagatccccaggccctccaggtggctgtggccgcggcccaggcggtggagcgggtgggaatgccggagtcccagattattttgtcccaggctgtctcctatctggcctgtgcacccaagagtaattccgcggtaaatgccatctctgctgcaatggaatctgtgaaaaaggtgaaaaccacggttcctccccatcttcaggatgcccactacggaggtcatgaagccctgggaagagggatcggctatctgtatgctcacaattacccagatcattatgtacagcagcagtacatgcccacggaaatccagggtgagcatttctatgagctcagtgatatggggtatgagaaggtgatgaaggagcatatgcgccgcataaaagaaaagaatacgggggaatgatctatgggaaaagcaggaaaaaaagcagtcgtggcaggacacatctgcattgacatcacaccagtgtttccaaaaccaaaggaaggaacaccagtaaaatccctgggtaagcttttggttcccggcaagcttctgcagatgggaccggcccaggtaaatacagggggagcagtggccaacacaggacttgccatgaaaatcctgggactggatgtaaaactcatgggaaaagtgggagacgatgccttcggggggatgatcctgaatcttattaaaaattatggtgcctccacagagggaatggtggtctccaaggagtcctcctcctcctataccattgtggtggcagctcctggcatagaccgcgtctttctccacaatccgggagccaacgatgatttctgcgcacaggatctgaaagaggaagccctggcagatgcggatctgtttcatttcggctatccgcccattatgaagaagatgtaccaaaaggacggggatgagctggtggaaatgtaccaaagagtaaagaatatggggatcgccacctccttagacctggctgctgtggatccggactccccggcaggacaggcagactggaagaaaatcataacaaggatcctgccctatgtggatttctttgttcccagcgtggaagagctgtgctatatgctggacccagagcggatggagcagtggaacgagagagcccaggggggtgatgtgacggagattttagatattgagaaggatgtgaagcctctggcagaccagtgtatgaaattgggggctaaggtgcttcttctgaaatgcggcgcccctggtatgtattaccgcacagcctccaaagaggtgctggagggcatcggaaaacgggcggagctggactgtgaagcctgggcagaccaggaaggctttgagaaaagctatgttccccagcaggtcctctctggaaccggagcaggggataccagcatcgcagcctttctcacagccatgttaaggggatatcccttaagccggtgcctgcagctttctgctgctacgggagcctgctgtgtggcagcctatgattccctcagcgggctgaagacctttgaggagctggaaaagaaaatcgacagtggatgggagaaaaatggaggggcttaaataagctcctccattaaatatgcgtaaatatcctgagattttcgtttccaactgtcacacacagccttggcggcctcctcagagggaagggacagggtaatctccagcttggaagcccctcgttccagaatctggcagcgcaccgagtagtctccctttggagtctcgtagtagtctgtgttggtggccaccggattgggggtggtcatccccagcttttttaagaacacctgcacatctttcttgattcccgcagatatttcatcgtcaaagtaggagagggtggtgcctccctcctgggtcagacggtaatgggtggcgttgcggatggtctccacctccaccagcccggaatccgccagatccgagatgatctgctggagatgaaaataattggtatactccccctccagcataaagtccgatatctgggaattggtcagggggtgctttgaatttttcagcatatataaaatgattagtttgtacagcatggatggctgtgccatagaagaagctcctttcctgtttcctttcacggggtataaagtcttccctgacaggtgcctcgttgtttcatttcatggtggagaaggttgagcacttcccgtttccggctggcccacaatggggcgaggagcaggtccttgggaccgtccccggtaatgcggtggatcacgatctcaggcgacaggtgctccaggcaggaaatgagaagatccagatattcttcccgggaatacacggaaaactttccttcctcataatctttggccaggtctgttcctgaaagcacatggagaagctgaagcttaatgccctgaatatccatctggttcaaatagaccatggtctgcaggatatcctccctggattctcccgggagtcccagaatggtgtgcacgatcacctctatgcttcttgcccggagattttcgaccgccttatgaaagcactccagaggatagcctctgcggatataagcggctgttttctcatggatggtctgaagacccagctcgatccacacaggctttttctcgttcaggcgggagagcagttcaaggaccggctcccccagacagtccggcctggttccaatggacagagccacaaccttgggatgctctatagcctgggtgaaaattttctccagatactccactggggcataggtgttggtgtaggcctggaaataggcaatgtatttctcaatgggacgcttggccttcagcaccgctatctgggctttgatctgctctgggatggacaaggaggcatcagcggcaaaatccccggagcccccggcgctgcagaagatacagcctccggtccccactgtgccgtcccggttgggacaggacattccgccgtttaaggttaccttgtacaccttttcaccaaaacggctgcgcagcatgtgatccagagaatagtacggcttttctccccacagcatggcttaggattccttgttggagggaagggtttcctgagactctccttcaaatctgccttcgttctcgtcctcttccttgggaatgtaatggtcaaagaccttcataaagaagatggaattcacataggcaacgcatccaaagcccagcaccaggaacagcatcaggatcagggactgtacctggaaggaggggatgaagaagatcaggatggggcaggctgagatcagcagcatcaggatggtgtaggggagatggcgcacagccatcagggccgcattcacaaaggtctgcttaatggtattgtagaacttagccagcaccgggtacacgtacagcaggatcagcgcatagaaaaaggtgaaggccataaacaccaccatcagcaccttggacagagtgccttccatctggttgctgatgcgcaggtccatgaaaaggaacagtcctgtggcgatcatgatcacattgatgatggttgcctgacggaagttttccttaaaggatttgaagaagctgcgcacaatataggcttcttcattccgggccattttcaaggttacataatacaaggcagtaatggacgcaccggctgtcacaatggggatgcagcagaggatgcagagaatgttcaggatcgccagatccgccagctttcccataaaggtgaaaaacttgttgtccatactaaataatccgttcatgtgctcttaattccttctttcttagcttctttttcttaatggtgacaaaaggccgctgccctttacctgcccggcagcggggcatcttaaatcggtatctccttaagtatagcgaatctctcatgaaaaagcaaactgaaaatcatggatccagggctttacctgcttttgtaggacacctacaaaacacctggggtctggctggcggccagtgcaagaatttcttgttgagttcccccacagctttgctataatgggaactagtgaacgatacacagaacaggagacgggaaagagcctaaagcacacagaaggcaaggatatcccggaatcttttacggaaggaaagagcatgaaaaaacgaaacgtgcacaaggaatatgtaattatggcgtctgccgtgggcacagtggtgctattggtagtgcttatgacctcctactatggaaatgtgatggagagtgtgggggtccatgcggatgagatgaaccaggtgtatcaatatcagtatgagatgatcgtggacagcagaaataccactttctggcaggcagtgtatgaaaatgccagacagaaggcccaggagcagggggcggttctggagcttcacggcacggactggggccaggattatgacaaggcagattttatggatatgagcattgcctctcaggtggacgggatcatcctggaatacaatggagaagagaacctggaggagaagatcaatgaggcagtggagaagggcatcccggtggtgaccattgtcaatgacgcgcccaaaagcctgcgtcagtcctttgtggggatcaatgactaccagctgggacaggtctatggggcccaggtggccaagctggtggatgataaaaccaagaccgtgctggtgcttttaaacagagagcaggagcttagccaaaaccagctatacagccagatcaacagtgcagtggcggagaagacaaagggaagcggaaaaataaagatccaggcccagaatcttatgtcaaaaagccagtttgacgccgaggaggccatacgaaatattttccagaccccgggaggaccgccggaaatcctggtgtgcctggatgaagtgactacggagtgtgcctatcaggcaatggtggattataatatggtgggcgaggtgaacattgtgggctactacacctcccagacagtcatggaggcagtgaaaaaaggactgatcccagtcaccttcagtatggatacagcccagatcggaacctacagtgtggaggctctcacggagtactggagcgagggcagggccaattcctattataatgtggacctgaactttgtcaccaaggataactggaatctgcggcgggagatgtgagtatggagaaaagaaaaatcagtttgcgctgggaggatatgcctctggcccggaaggtgctctttcaggtggggctggtggctgtcatcctggtggtcatgaatatggtcatgtatcttcaggtgaataagaccatgcagagcatggagagtgtgtacatgagcaatgtgaatttaagtgagctggcagagtccctggactctgtacagacagacatgtacagctatctcacggtgaaaacctcggagtccctggagcggtattaccgcagcgagcaggaatacaggaatcttctggagaagctcaacgaccaggtgatggaaaatcccgtaaagcttctggaaaaaaatatccggaaaatgtcggagacttatttggagcagaccgcggagacggtgacggccaaaaggggacgaaacgtggaaaaatacaaggattcctacgatgtggcccagaagctgtaccgctatttgaactcctatatttatgatctgaacagccagcagttcaagaacaactcctccagctaccaggcccttcaggcagctcttcagtatctggaggtattcagctctgccatcctggtggtgatgatgggcgtgtgcattttaatgctgtttcttatgatcaagggcgtggttgcgccgctgacaagtctggcggcaacagccaatttagtaggccagggaaattttaatgtgaaaatgccgccaacggatgccaaggatgaggtgggcgtggtgaccagggcctttaacaccatggtatccagtctggaggagtacgtgaagctcaccaaggagagcatggagaaggaacagcagatgatggagcgggagcttctcatggaaacccatttaaaggaggcccagctaaagtacctccagtcccagatcaacccccatttcttatttaattctctcaatgcaggagcccagctggccatgatggaggatgcagagaagacctgcatctttgtggagcgtatggcggaatttttccggtacaatgtgaaaaagggcagtgaggatgctacccttcaggaggaagtggaggcagtggagaactatatttacatattaaatgtgcgttttgcaggggacattcattataccaaggagattgatgagtccgtgctctcctgccggatccccagtatgatcctgcagcccattgtggaaaatgcagtgaatcatggaatccggaacattgactgggagggcagcatccatctgctggtggtaagagacgcagagaacatccgcatcagtgtgaaggataatggtctggggatctctcaggagcgcatccaggaaattctcactggttccattgaaagagaggaagaggatggagattccacaggtattggaatgaacaatgtgatcaccaggctggagctgtattatgccaagaagggattggtgcagatctacagtcccggtgaaaaccagggaacggaagtggtgatcaccgtcccgattttatctatacaggatgaataagcaaggtagagcctgtactggaaaaggacacaaaaaaaaggcccatgttcaaacggccggaattaaaggagctttttatagggaagagcctgtagagagagcagcagtggttagttataatttttctagggaaggaatcgaatatgtatcggattatgctggcagatgatgaaggtattatgctggagtcactgaagaacattattgagagtaattttggaagcgaatgcgagatcgcctgtgccaaaaccgggcgggcagtggtggagcaggcggagagcttccggccggacattgcctttatggatatccagatgcctggcttaagcgggatccaggccatgaaggagatccgcaagtttaataaaaatacgatttttgtggtcattaccgcttacgataaattcaactatgcaaaggaagccatcaatctgggagttctggaatacctgacaaagcccgtgaataaaaaggtgatcctggaggtgtgcatgaaggccatgcgccaggtggatgaggcaagacagaagcgcagcgatgacctgaagatcagggagaagctggagaccgtggtacccatgatcgaatcgggctatatctacaatctgcttcttcaggatgattttcacacttatgagagcaactataaggagctgctggatattaaagagcagtatgcctttatgacagtagtagagtttggagacagcaatgaaaatggagtccttaccaacgcagtgggagccagcgtaagggccagcaagttttacccagagctgcgggagatcgccaaggacttttttaactgcctggtagggcccattatgggaaaccgggtggtgctcctggtcccttattataagggaaaggtggagtatgaggagcgggtggaggtccttacaagaaccagaaacatgatccataagctggagaaccgcatagacagcaagttccgggcgggaatcggaagagtgcgccccctggaggaggtgaaggaatcttatacggaagccctccgggccctgcgggaggaggacagccatgtagtgcacatcaatgacgtacccattatccaggattatgatggagagtacccgctggatttggaaaaccgttatatgcagcgtaccctggaggcggatctgtcaggagcccttgctgtggccaattctttttttgactggatgctggagaattatagtgactaccgggaggatattgagatcaaagtgctggagctggtgatgcaggtggagtacagggcctttttccggggcggcgccaaatacggctttcactatagggctaattatatccgggacatccagggctgcagggattatgaacagcttcggggctggttcctggagaaaaccagccaggtgtgcaagggaatggccaccaccaaggaggcacaatcagagtccgtggtggaaaaggccaagacttatattaatgaaaatttccagaaggatatttccttggatgaggtgtccagggtggtggatatcagcccctattatttcagcaagctgtttaagcaggaagagggggagaattttatagaatatctcaccaaggccagaatgaccaatgccagaaagcttctgaaaaacccaggctacagcatcaaagaggtatgcgccatgtccgggtacagtgatccaaattatttcagcaggatctttaagaaatatgaaggggtgacgcccagtgaatatagagaaaggttggggtagaggatgaagaagcacataggggtgctcttgtgcgtggccatgctggtgctgggtatggcaggctgtgggaaggagccggtaagcctgcctcagggaggcactgaaacagaggcccaaaaggaagagaacggtgtgaagattggcatgagtgtggattcctttgtcattgaacggtggatccgggaccgggatgctttcgtgtccacggccaaagagcttggggcagatgtgaatgtacagaatgcaaatggggatgtgaaggagcagatctctcagattgaatatttaattaacaagggcgtggacgtgctgctggtggtggcggcggactgcaatcttttgtctgacgtgatgcagaaggccaagagtctgggggtaaagaccatctgttatgaccgtctcatacaaaaggcagactgtgatctgtacatctcctttgataatcatgcagtggggacgctgatggcccgcacattgaaggaaaccataccggaagggggagagatcttcatgatccagggaccggaggaggataacaatgtaaagctggtgagagagggatttaatgaggaaattaaggacagcagcctgcatgtggtctacacggtcaactgtgaaggctggctggcagagaaggcggcggattatttgccagaggccttggccatgtacccggaggtaaaggggatcatgtgcggcaacgatgatattgccacccaggtgatccgggtactggcagagaaccgtatggcaggaaaggtgaaggtggtggggcaggacggggatctggctgcctgtcagagaatcgtggagggtacccagaccatgactgcctttaagtccgtggagcagcttgcggaggaggcagcccactacgcagtgcagcttgccaagggggagaagctcaaggaggtgaacagctccatcaatgacggagcccaggaggttcccttttccatgcttatgcccattgcggtcacaaaggacaatatggatgagatcatcattgagggcggcttccactcttccgaggatgtttatctgaatgtaccaagagaaccctgaatttatgaattgttttagggattatgaacaaaccatgaacaaaatgtcaataggaaatttttgtggcaaaaatgtcttgcactgtgcaggacatttttctttttccaaaaaatgtccggtactttgccaactaagtcctgtatgtgccgtggtatagttacaacatcaaaaagatgtacgaacaaagtacaaataagaattggaggatttgaaacatgaagagaaaattagtagtttccatgctgtgcgcatccatggtagcaggaatggtcgtaattcctggcgtatccgtaaaggctgatgacgagaaaaaagtgatcggtgttgcaatgcccacaaaagacctgcagagatggaaccaggacggctccaacatgcagaaagagctggaggaagctggatatgaagtaaatcttcagtacgcagcaaacgatgttgctacccaggtttcccaggttgagaacatgatctctgacggtgtggaccttcttgttatcgcatccatcgatggcagctcccttggaactcctctggcaactgcaaaagagcagggtatcccggttatcgcttatgaccgtctgcttatgaactctgacgcagtttcctactatgcaacctttgataactatctggttggacagaaacagggcgaatatttagtagaagcgctggatctggaaaataccgatggaccatacaacattgagcttttcaccggtgacccggctgacaacaactgtgtattcttcttcggcggcgctatggacgtactgcagaaatacattgacgaaggcaaactggtagttccctccggacagacagaatttgagcaggttgctactcctgactgggattcccagaaatctcagaacagaatggacaccattctggctggaaactatgctgatggaacaaacttagacgcagttctctgctccaacgactccacagcacttggtgttgaaaacgctctggcttcttcctataagggagaataccccatcatcactggccaagactgtgacgttgccaacgttaagaatctggtagctggaaaacaggctatgtctgtattcaaagatacccgtgctttagcaactcaggttgttaaaatggtagatgcgatcatgaagggcgaagaagcagaagtaaacgatacagagacctatgataacggcactggcgtgattccttcctacctttgcgagccaaccgttgttaccatcgacaactacaaagaaatgttagttgattccggatattatacagcagaagagatcggtgctgaagcagaataagctgcagcgaggaaatagctgaataataagtaaatagaagtctaattgttcaggcgggtgcaagccacccgcctgtaatttctgatagggagggataggattggctaagatacttttggaaatgaaaaatatcaccaaaacattcccgggtgtaaaagcgctggataatgtaaacctcaaagtggaggaaggagagattcacgccctggtgggcgagaacggcgccggtaaatccacgttaatgaacgttttaagtggtatttatccatacggctcctacgaaggagatattgtttacaacggagaaatttgtaagtttgataagatcaaagacagtgaagaaaaaggtattgttattattcaccaggaattggcactgatcccctatatgaccattggggaaaacatgtatttgggcaatgagaagggaaaagccctctccattgactggaatgagacctatggtgaagcagataaatatttgaaaacagttggtctggaagagtcttcccagacgttgatcaaggatattggtgtgggcaagcagcagctggtggagatcgccaaggcacttgccaagaatgcgaaattattgattctggatgagcctacggcatctttaaatgaggatgattccaaagcccttctggatctgctcttgaaattcaagaagaatggaatgacctccattattatctcccacaagctgaatgagatcgcttacgtggctgataaaattacggtaatccgtgacggctccaccatcgagactctggataaggaaaaggatgacatctccgaggccaggatcatccagggcatggtaggacgtgagctcacagaccgtttccccaagcgtcctcatgtaaagatcggacctgttgcaatggaagtaaagaactggaatgtgtatcacccgctggtgtctgagcgcaaggtggtggacaatgtttcctttaaggtacacaaaggcgaggttgtgggtatttccggacttatgggagcgggaagaaccgagctgtctatgagtattttcggaaagagctatggaacgaaaatttccggccaggtatttattgagggccaggaggtccatcttaatacggtccatgacgcgatccgccacaagctggcctatgtgacagaggacagaaaaggaaatggactgatcctctccaatcctattaaaattaataccaccctggcaaacatgggtgcggtgagcagccatggagtgatcgacagggataaggagtatgcggtggcagaggaataccgtgagaaattgaagacaaaatgccccactgtggagcagaatgttggaaatctaagcggcggcaaccagcagaaggtgctcctggcaaaatggatgttcgcagagccggatattctgatacttgatgagcctactcgtggtatcgatgttggagcaaaatatgaaatctactgcattatcaatgatctggtggcagcaggaaaatcagtgatcatgatttcctccgagcttcctgagattctgggcatgtctgaccgtatttatattatgaatgaaggaaagatggtgggagagctgaaggcctctgaagccacccaggaattgatcatgtcacgtattttgaaatcaagtaaaggagaataaaacatggagaataaaatcaacatttccgaagtaattaaaaaatataccatggtcattgtccttgtggccgttgtgatccttttcaccatcaacactggtggaaagatgattcttcctcagaacgtaaataacctgatcgcccagaatgcctatgtatttgttctggcaaccggtatgctgttctgtattttaacaggaggcaacattgacctttctgttggttctgttgtatgcttcgttggagccatcggcggaaaaatgatggtaaacaatgagatgaatccttatttagccatgttggtcatgatcctcatcggccttttggtgggcgcatggcagggcttctggatcgcctatgtaagaattcctccgttcatcaccaccctggcaggaatgctggctttccgtggattgtcaaacgtggtgctggaaggaagaacgctggctcccatgcctgacaagttcctggtactttttaacaactatgttcctgatttcttcggaaacgaaacctttaacaccacctgctttattgtgggaattgttgcctgtgttctctatgtagcggctgtattctatggcaggggacagaaaataaaaaaaggctaccgtgtggatcccatgagcggcatgatcatcaaaatggttgtgatctgtgcagcagttctggcatttatgttccgccttgcccagtacaaaggtattcctaatgtattgatctgggttgttgtgatcgttgccatctatacatacattgcctccaaaactactaccggacgttacttctatgcagtgggcggcaatgagaaggctaccaagctttctggtattaacaccaaccgtgtatacttcctggcttatttaaacatgggacttcttgcagccgtggccggaatgatcaccgtagcccgtctgaattctgcaaacccaacagccggtaagaactttgagatggatgccattggctcctgcttcatcggcggcgcttccgcatacggcggcgtgggaaccgttcctggagttatcattggtgcgctccttatgggtgttctgaacttaggtatgagcatcatgggcgttgaccagaaccttcagtctgtggtaaagggtcttgtacttctggcagccgttatctttgatgtagtaagtaagagaaaagcatttattgtaaaataatgaaatgacgctgtaatgaaatcgcgtcgaaacctaaaaaagtgactgccaggaaacaggcagttctaaccaggggaagcattggctcgtatgagtcagcgcttcccctggttttttttgcggcacagaatggcagttgtgccgtcatagatgaagaaattcatttgggagcgctgatgattgatggtgaaggtgtgctccttttcccctctgcggatcattccctgatgttcatagaagccataattgcagcttgtgtccgtgaataaataaaaatttcgtataccttcctttttcatttgtaaaaggactttccggaacagctttttgccaatgccataacctcggtagtgggcatttacggcgaagaaggcaatttctccctcatagtctttgaaagtgttttttaacagttcatcatcaatttggcttacgttttgaaagatttcagaaacctgtctgccttctttggatacaaataaggagagaatagacatgatctgttttaagcggtatttcagcggacatttgtgggtgcggatatttttcatcataatgacgcccacaggtttttcatctatgagggcaacctgcgtgtaggtttggttagtaagacagctatatagaaatatccttgcaagtttttctgcggtttttggactgctgaatttatcgtagttccatgcttcacggataatatttaccaattcctgggtgtcgctgttctgatattctctcagtgtgatttgtttattcatttctatactccttgctggttttttattgttgacgtatactgagtataaagtatctagttactgtaaagtcaaggaggaaatgtatgaaaaaagaaagcataaaaatgacaacggcccaatttgccaaactccacggtgtgaataagagaactttgcactattatgacaatatcggcctgttttcaccaaggtataagggagagaacaattacagatattatgattattctcaaagtatagaattcgagtatatacggatgctgaaggaattacatatgggaatagaggagatcaaggcttatataaataatcccaatgaagaggactttatcagaatcgcaaagggaaaggttgaggaaatcgaccaggatatacagcggttgaaaagatgtaaaaggatactccaggataagatgaagaagctggaggtatgcagaacaatggaaaatcaagatattcggcttatagaatgcgacgaagaacggtatctaaccataccttttgatttcaaggaggatgatctgcaggggctgatgacccgggtgaatgaggtgtggagcgccgagcaataccgtatgggaattggaagctacatcttagtggataaggtgctaagtgaagactttgagacttatgaaggcctatttactattgcacctaagaggacgaaaggtcgggacattcttattaagcctaagggaacatatgtgtgcgggtatcaaaggggaaaatgggaggagctgcctgatctgtataagaacattattcgttttgcacagaaaaactgcctgaaactaactggatatgcctttgagattgggatcaatgattttgcaatatcggatataaatgattatgtaacacaaattcagattaaggtcgatactggaaactagcgtctgccatccgtatattcaggagtatccttaatcctttggtttgccttatgccagtgaaagaagttgtgatctttgtttttggtccatcaacacataaaaaataaagttatatgaatataatccattttagtgttgactttacatttagtgtacactttatactaaatgaggagcaagtgtgagtccacacgaaaaagtttagactgaaaggaatgatcctaattgaatttattaaaagaaataatcggttatataatagaagggattgtagagctgggagcagagataacactggataatggtaacagaaagttcttgtcaaataaaaaaaggagtttgggttcaaaggtatgtttcctaatatctgttttaattgacgtcctattattagccagaggtgttttacaattcattaagggagatcctgtggatggtacgatctgtattttattggggataggaatagctgcatatttcattatagttagggaaagccaaaaaggagaaaaataaggatagataataagaatggatacgtggtacaaaaaaagttctggataaatacatattgaaaaaagtgccaaagaacacaggcaaagattgttaaaaacagagaaacatgccggagcaggacaactatatagacagaaacccagaatatgtgtattatgatggtaaaggataactgcggaaaaactacaccaaagaaatcacatgaaagaaactacagcagagaaagtacaccagtttctgtaaaggaaccacagtgtcatcaagggcacagaaagggagagctatggggagtgttaaacatagattcagatttttgtatagtattttaggtgatacaaggtgaacattgaaaaaatatttaagaatattcctgctttgaataatatttcactggatacgattttatttgaaagtaagtatcccgtattgtttacatgtaaaagccaggaggatatttatctgtttatctgttgtctcgtagattcatctatggcacaatggattggaacaaggacagactatgagacattgatcgatcttttagaaaataagatcacgattcaaagtgcttttttgagtgtgacaaaagataaaatgatgattgaatttgatggtagagatatacgaaataaggttgtccaaagcaaggatatcccggataagcttttgtcgacagctggagagtatatggatgcaaaagctgatgaatacgcagaggaaattgaaatctttcaatttagaaataaaaatatgaaatccaataaccggatgagcagcagtggttcgaaagaaagtacccgcagccactgcaaatttatggaattcctgtgaaaaacaccaattccagcttgacaaaagaaaaaatgaacagtaagataaaatccaagataaaggttgtgagaaagaggagtatttccgtaaccctggcagagaggagcatccacaggctgaaaggtgctttgaggcagtgcgggaagaaggtagcttttgaaccggagggctgaacatttagtaggctttcccgtattcctgcgttaaaggacaacgagatgtgcccaggcacataacgaaggtggtaccgcggtttcaatcgcccttcacacacatgtgtgaagggcttctttaaatttaaaagcatgaaaaatttaaaagtatgaaacttttaagacgccaaatgaagcgtcaaagaaaaataaccaagacagaacttaaggaggatcacatgagcaaagaactggcaaaaacctatgaccccaaaggcatagaagaacgtctttataccaaatggatggaaaatggatatttccatgccaaagtaaaccctgacaagaaaccatttaccattgtaatgcccccgcccaacgtaaccggacagcttcatatgggacacgccctggacgagaccatgcaggacattttgatccgtttcaagagaatgcagggctacgaggctctgtggcagccaggaaccgaccatgcggccatcgccacggaggtaaaggtcattgaaaaattaaaagcccagggcattgaaaagtccgacctgaccagggaagagtttttaaaatatgcctgggagtggaaggaagaatatggcggcaagatcatcaatcagttaagaaagctgggtgcctccgcagactgggagcgtgaacggttcaccatggatgagggctgttccaaggcagtacaggaggttttcatcaagctttatgaaaaaggctacatctacaagggctcccggatcatcaactggtgcccggtatgccagacctccatttccgatgcagaggtagagcatgaggaccaggacggcttcttctggcacatcaattaccccatcgtgggagaagaaggccgctttgtggagattgccaccacccgcccggaaaccatgctgggggacactgccgttgcagtaaacccagaggacgaaagatataaggatctcgttggcaagatgctgaagcttcccctcacagaccgagagatccctgtggttgcagatgaatatgtagacaaggaattcggaactggctgcgtgaagatcactcctgcccacgaccccaatgactttgaggtgggaaaacgtcataaccttccggagatcaatattatgaatgacgatgccaccatcaacgagttgggaggcagatatgcaggcatggaccgctatgaggcccgcaaggccatggtaaaggatctggaggagcagggccttctggtaaaggtggttccccacgctcataacgtgggaactcacgaccgctgcggcacaactgtagagcccatgatcaaaccccaatggtttgtgaaaatggacgagatggccaaggaggccatcaaagccttgaagaccggagacttgacctttgtgccagcccgttttgacaagacgtatcttcactggctggaaaatatccgtgactggtgtatttccagacagctttggtggggacatagaatcccggcctattactgccaggattgcaatgagaccattgtagcggcagagatgccaaagaaatgccccaagtgtggaggcactcatttccagcaggatgaagacaccctggatacctggttctcctctgccctgtggcccttctccacactgggctggcctaagaacacagaagaattaaagtatttctatcctaccgatgtgctggtgacaggttatgatattattttcttctgggtgatccgcatggtgttctctgctttggagcagaccggggaggttcccttccatcatgtgctcattcacggtctggtgagagactcccagggaagaaaaatgagcaagtcccttggaaacggcattgatccgttggaggtcattgacaagtacggcgcagacgccctgcgtatgactctcatgacaggaaacgccccgggaaatgacatgcgtttctattgggagagagtggaggccagcagaaactttgccaacaaggtatggaatgcctccagatttatcctcatgaacctggaggacaggactgtgacccagccggaggatctgaaggctttgtgtccggaggatcagtggatcctgtctaagatcaatgacgtggccagggatattacggaaaatatggagaaatacgaactggggatcgcccttcagaaggtttatgatttcctttgggatgaattctgtgactggtacattgaaatggccaaggtgcgtatttggaaagccgatgaggagcccaagaaggcaaatgaggccctgtggactctgcgcaccgtgctcacagaagccctgaagctgcttcatccctttatgccatttatcacggaggaaatttactgcaccttgcttcctggggaggaatccattatgatctcttcctggccggaatataaagaggagtggtccttcccccaggcagaggctgatgtggagcatgtgaaggagattgtgagaggcatccgtaacaccagaaccgagatgaatgttcctcagaataagaagacaaaagtatttattgtgggcagagatgaagcgtcctgccgtggatatgaatctttgaaggctgcctacaccaacctggcttatgccgcacagattttcgtacagcaggacaaggccgggattggggaggatgcagtgtccatcgtggtttccaatgctgtggcttacctgcctctggaggatctggtggacagagagaaggagctggagcgccttggaaaggaaaaggaacgtcttgggaaagaaatcgcccgttgtgagggaatgctgaacaatcccagttttgtaaacaaggcgccggaagcaaaagtgaatgcagagaaagaaaaattacagaaataccaagaaatgatggagaaagtcaccctgcagctttcgcaattgaaccaatagaggaggacttacatgaaaccctggtacgagaaattaaacaggatttccctgcttcttcaggcccttggctcctgtgtgatctattttatcatagaagccatctcccgtcattcggtgacagcggcctggacctatatgacagggaagcccctggtgtttctttataatgcgggaatgctctttgtcacatctcttttggtgtatctggtgagaagaagatgctttttaagaaccgtacttgctctgttctggctgatcctgggtgtggtcaacggcgtgcttctggccaacagggtgacgccctttacagggccggacctggagctgatcacggacggtctgaagattgggaaaaaatatctgcccgcatggggaatgacggccatggtcattgccctggcggtgattggtgtttttctggtatggctctttatcaagggaccccggtatagaggaaagatgtattataagttttccattcccctggtcctggcgggggcggcagcctttggaggagtgaccaagctggccctggagaagcgtgtgctgtccaattattttggcaacattgcctttgcctatgaggactatggctatccctactgtctggccaccacaatattcaacacagggatcagccagccccaggattattcagagcaagagatcaagaagatcatgaacagtggaaagaagctggaggagacaggggaggaacggcccaacattattttcctccagctggagtccttctttgatcccaccctggtaaattacctgaatatttcccaggaccccattcccaccttccgaaagctgatgaaggaatattcttcgggatattacaaggtgccctccgtaggtgcgggcactgccaacacagaatttgagtccataaccggaatgagcatgcactatttcgggccgggggaatatccctataaatccattttgaaggagaccacctgtgaaagtgcgccctatgtgcttaaggagctgggatacaccacccatgccatccataacaatgaggccaatttctatggaagaaaatccattttccccaatctgggcttcgacaccttcatctctgaggaatatatggaggacgaggaccagaagaaccctctgggctgggtggaggaccggattctcacgaagtccattatggagtgtctggaatcctccgataccccggactatatctatacgatttctgtccagggacacggtgcctatccagatgagccgcttctggaggagcctgacatcacggttaccggtgcgcccacagaggcggccaataataaatgggagtattactgcaaccagatctacgagatggatcagtttgtgaaggagctcacagaaactcttgcggactatgacgaggatgtggtactggttatgtacggcgaccatctgcccaccatgggactgaatgtggaggacgtggacaataaatatctgtttcagaccgagtatgtgatctgggacaatatgggacttcagaagcaggacaagaatctggctgcataccagatggccgcagaggttatggaccaggtgggaatccacgagggaaccattttccgctaccatcaggccagaagagagactaagaactaccaggtggacttagagaccctccagtatgatgtgctctatggagaacggtatgcctatgagggggagagtcccttcaaacgtgtgaaaatgcgtatggggctcagtgacattaccctggattctgtcacgaagatttctgacggtctgtattatattcatggctccaactttaccccatccacggaaatgcagattaacggagagtggtacgaaaccacctatctgaacccaaccactctgctgatcaccgggtatgagcttcagcccctggacaagctgacggctgcccagcgcagcaacagctccaccagaaaggccctcagcaagagttatgacagactgtattatgcgctggccggggcaggtcaggaaaaataagctttcttctgtgaattccggcgggggatgccggatacacagggatgggtaacatattgtcggataaaatattacgattggtactggacaacgatcaccactatattataatgttaacgtagcgttcttttgggggcgctgctaaacttatgataaagtggtgatatttttatgacagagatgtatcggcaggcagttgattatattgaagaaacccctaaatttacaacaaagaactccctggagcataccagagaatgcctaagaaggctgggcagtccccaggagaagttccgggtgatccatgtggcagggacaaacggcaagggaagcacctgtgcttttctcacatccgtgctgagggaggctggatattcctgcgggcttttcacctccccccatctggtggagatcaatgaaagattccagatcaatgaggaggtcattgacaatgacacttttctcagggcttatgaaaaggtgaagaggctctccgatgagcttgtggcagagggaaattatcatcccacctattttgaattcttgtttttaatgggaatggtgatcttcgcagaggcaggggtggactatgtgacactggaaacaggccttggcggccgtctggacgccacaaccgccgtggaaaatcccctggtgtgtgtgattacctccatcagctttgaccatcagcagtatctggggaataccattgaggagatcgcaggggagaaggcgggaatcctggtgtctggcgtgcctgtgatctatgacggcaacaatcccaaggctgcccaggtgatccgggagaaagcccaggagctgggatgtccgtactttgccattgtggaggaggattgtgaaattttacgaaatacgccggatggaattgatttttccatgaagaacggatatgatgaagataccgtgtttcatattccttttattgccagataccaggtgatgaatgccgccctggcattaaaaactctggagatcctgagaaaaagtatctcttttagcaaagaacagcttcaaagaggaatgtcccagacccgctggcagggaagaatggagacggttttaccgggagtcatcgtggatggcgcccataacgaggacggtgtggcacgttttgtggagacagcagcgcattttcaggaggactacccgatcacgcttctgttttctgcagtggcagacaaggattacaaggatatgatctccaccatttgtaaggggatccggctggagcatgtggtgaccactcagattgacggttaccgggtggtgccggcacaagagctggccagggaatttgaaaagcaccaggtacctgccgtgggtgtagaggagattcccgcagcttttgaaaaagcactggaaaagcggggagaaggcctgctgttctgtgtgggctccttgtatctggtaggggagatcaaagggatcattaggagaacagtacatgattgattatgaagaagaactgaagaaatttgaacccagcctggatgtgacagacgcagaaggcgtcatttccaaacaggagctgaccgatattctggatattcttcaggaagtgctgaaggaagccaaaagcggcagaaggttaaaataaggagacaatggatgaattgcaggaattgcggagcctttctcaatgacctggatctggattactgccagcgctgtggggcaaatatcctgatacagaagaaagcagagtacttatccaagctttattataatcaggggcttgaaaaagccagtatccgggatctgtcaggggcaattacatgtttaaaatcaagccttatgttcaataaggcaaatatacaggccagaaaccttctgggtctggtgtatttcgagacaggagaggtggtctctgctctcagcgagtgggtgatcagcaaaaatctccagtctggacggaatctggcttcggaatatattaataagctgcaggctaacccaggaaagctggaggccatcaatgagaccataagaaaatataaccaggccctggcactttgcagggagggccatgaggatatggccgccattcagttgaaaaaggtgctcacgcagaatcccaagctgatcaagggataccatctcctggcattgatccagatgaaggagcatgcctggaacaaggccagaagaaccctgaaaaaagcggtccgtattgacaagaccaataccaccaccctgcgctttttaagggaggtggatgagcagactggggtggccaccaagctggagggcaagggggccaagaaccggcgggataccaatggggagcccgaggatggcagaagaggcatctcctacccctccggcaatgataccattatccagccccctgcttacaaggagcgctccatgggaggcatcctggcagcccttgggctgggcgtggccatcggcgtggctgccttttggtctctggtcctgccctctgtgaagcagggcatttataaagaagccaatcagcagatcattgattacagcgataccattgtgagccaggaggcagagctgacccagatcaaaggatcccttcaggtgaatgacaacagtcaggatcaggcccaggcccagcagcagatcgcggcagtgcaggccagaagcagcagctatgaagctctgctggctgcctacagcgccctgctggccaacaatgtggacgaagcagcggcccaggtccagaaggtgaagccaagtaccttaagcgagaccgcccgtgccatctacgacaacgtgtgcagcgagaccggggcaagcgggagcgaagatctatacacggacggtacggcggcagatacttccggcgcccaggatatcccggcagacgaccagggaacccaggacggaagtgctgatgccagcgcagacggtaccgatacacagaattacggatacgacggacaggattataacaacaccggatatactgacggcacagattggaataaccagggatggtatgacaatggtgacaactatggcggtgatccctatgggggatacactggctattgaccgtccattcgcacatacaaaggaaaaacctcgaagaaggggcgcagactgcgttccttctttttttggtgtgaataaagaggggattttgtataaaaaaggaaaaaagaggggaaactgacttatgaatgaacaatttcaaattcaaggggtatgcctgaccatcctgcttccaagggagctggaccacccggaggcagaccgcatccgtcaggagacggaccggatcttgtccaggtgttatatcaagagcattatttttgatttccaaaatacagagtttatggacagctcggggattgggatgatcatgggcagatacaaggcccttggaatgaggaccggatgcatccgggcggttcatgtgaaggagcacatagataaaatcctgcggctttcagggctgcacacagtgatggaatgggactgtgcatcccgggagccggtgacggagaaaggagaatgacatggagaataccaatgaattgacaatgatctttgacagcaggccttgcaacgagggggtgatccgggtggctgtggctgccttctgcacacagctcaatcctaccttggaggaggtatcggatctaaaaacagcagtttccgaggcagtgaccaatgccatcattcatggttatgaaggccaggtacataagataaccgtcacctgcaggatccagggaaaaaccatccaggtggatgtggtggatgaaggtgtggggatttcagatgtgggaagggctatggagcctttgtataccacaaagccggagcaggagcgctccggaatgggatttacctttatggaggccttcatggatgaggtcactgtggaatcccagccaggcaggggcacagccgtgcacatgaaaaaacgtatcgggaggtgaatatggaccacactcttgccctattagggcgtgcgcaccaaggggataaagaggcaagagatacgttatttgaagagaatatcgggctggtgtggagcattgtgaagcggttcgccgggcggggcgtggagatggaggatttgtttcagattgggagtatcggcctgttgaaggcagtggataaatttgatctaagttacgatgtgcggttttccacctatgcagttcccatgataaccggtgagatcaagcgtttcctgcgggatgacggcatgctcaaggtcagccggtccatgaaggaattaagcggtaaggcctatgtggccagagaggtactggagaaagaactgggacgggagcctacggtggcagagctggcaaaggccctggaggtcacccctgaggagctggtactctccatggaggccggggcggaggtggagtcccttcataaaaccatctatcagggggagggcagtgagatctctcttttggataagctgccggaaaaggaaaaccagcaggaaaatctgctggacaagatctttctggaggagattctgggaactctggatgccagggagagacagttgatctatatgcgttattttaaggacatgacccagacggagatcgcaggagaattgggagtatcccaggtgcaggtgtcccggatggagaaaaagatcctggggttattgcgggaaaagctgtgaggcatccaggtatattttagaagaatctgtgtatactatttccaaatggaaaggtgggacgcagatgagcgaaacgttgtacatgcagtttgatatgaatgtggaggtggaccatcccaaggtccagcttcaggatgtggccaagcttgcctgcagggatgagaagatcctcaaccggtgccgggtcatgccagtggccagcctggatgcaagaaaaccgggaagatatgtgataaacgttatggacctggtggataagctgggaaagcaggagcccaatctggacataaataccacaggagagccctcttttatcatcacctttgtgacagataagcaccagcatccagtaatggagtggatcaagaccatcggggtgtgtatcattaccttttttggaatggcatactccatcatggcctttaacaatgacgtggatgtgggaaagctgttttctcagatttatgagcaggtgaccggacaggcctccagtggttttactattttggagatcacatattctattgggatcggctttggtgttttgtttttctttaaccatttcggcaagctgaagctgacccaggatcccactcccatgcaggtgaagatgcgcacctacgaggatgacgtaaataccaccattatcgaggatgtgggaagaagacaggcacaaaagcaggaaaaataatgaatagggcgtttctgtccaaaggcagctttctgaaagttagaaggctgccttttgtggtataggacattgtagaaaatgtccttgttttctaatggatttccactgtacaggaggaagggaaaatgataatctgttccagaacaggaggaattctatggacaggaacacagcacaggccatgacaggcctgatccaggaggtaaaagaaaaattaaaaggggagccccgcctggggctgctttttgaaaattgctacaaagatacgctggataccacggtgcataagctgcaggacgggaccacctatgtgatcaccggggacattccagccatgtggctgcgggattcagccgcccagcttcgcccttatttgatcctggctgcccgggatcccatgacggcagatctcattgaggggctggtgcgaagacagtttgcctttatctgtatggacccctatgccaatgcctttaaccaggaggagaactgggcctgctgggaggaggacgatacccagcgaaacggctgggtgtgggagagaaaatttgaggttgattccctgtgctatcccgtgcagctggcctatctgttatggaagaatacaggaaggaccagccactttgataagatttttcatgagggggccaagaagatcctggaggtctttgagacagagcaggaccatccaggaaaatcttcctattttttcaggagaaaaaacacctattttcaggatacgctgtccatggacggcagaggggccctggttaagcccaatgtgggcctgatctggtccggcttccggcccagcgatgatgcctgcagcctgggatatctcatcccctctaatatgtttgcggcagtgatcctgaggtttctggaagagatcggccgtgagatcctgaaggaggaaaccttggtggaaagagccttggtcctgagagagaatgtggaggaggggatagagaccataggcatcaccagaaccgaagaatttggggatatctatgcctatgagacagacgggtatggccagtaccggctgatggacgatgccaatattcccagcctgctgtccatgacctacctgggctaccggggaagagacagacaggtggaggccaacacaagaaggtttttgttcagcgatgccaacccatattattatgagggaacaaaggcaaggggaatcggcagcgcacacacagcctctggttatatctggcacctggccatggctatggaaggcctcacggcagctacaaaagaggaaaagctggctgctttaagaaggctggcttgtacagacgggggaaagggcctgatgcacgaagggttttacaaaaacgatgacaccaggtacaccagagagtggttttcctgggcaaacgctctatattgtgagctggtcctggactatctgggttatgagattcagagataatttccatccccctagaatttttacaggaaatatagaatcatgcgaattgtgacagagacaaaagtgaattacaatcacagtaagaaaccaaaggaagcaaaaggaggagctcatgtttttaacagaccgcaaattagacagaaggatatctgagcttgaagcttatcgttatagagagaaaacatccatacaggatttcctggtgtgggaggacgaagagaaattggtaaatccccaggttcctgtaaattatcagggctggagggtcatgaatattggcggccggtgggccggacgggaccgctatctgtggatgcacaagaccctggtgctgccccttgagtggaaggaaaaacgcctggtgggcatctttgattttggaaaaaccggagcagggaacaacagcggctttgaagccatgtgctatttaaatgaaaagcccttccagggtgtggacagcaatcaccgggaggtattcttccccagggagcaggcaggaaaaaagatcagccttaccttccgtctgtggtccgggctggagggcggcggtgtgcccgcggatcaggagcaccagatcaaggaggcagccatggcctggctggatgagaaggcagatgacctgtactatctgtcatccatggttttggaaactgtgagaaacctggaggagggcaatcctgtaaaatatgatctgagaaatgctttggatgaagccttccactgcattgactggtcttatccaggaagcagtgaattttatgagtctgtccatcaggccgcagatatcctcaatggaaaaatccaggctatggacaagcattccctggtaaccgtcagatgtgtggggcatacccacattgatatggcctggctgtggagactgaagcacaccagagaaaaggcatcccgttccttttccacagtccttcgtcttatggagctgtttccggaatacattttccttcagagccagcctcagatctatcaatacatcaaggaagattttccagagatctatgaagggatcaaacagcgggccagggaaggacgctgggaggtggacggcggcatgtgggtggaggcagactgcaatctcaccagcggagagtctcttacccgccagattcttctgggaagcaagtttatcaaggatgaatttggcaaggatgtggaatacctgtggcttccagatgtatttggctattcctgggccctgccccagattctgaagaaatccggcatagatatgttcatgacaaccaagatcagctggaaccagtacaaccgtatgccccatgacaccttccggtggaagggcatggacggttcagaggtgctcacccattttatcaccactccggaaccctggaacgagccaggctcctggttctacacctacaatggcctgcttacgccaaagacagtgaaaggggtgtgggatgcctacagtgagaaggagatgaataaggatctgctcattgcctatggctacggagacgggggcggaggcgtgaaccgggatctcctggaaaaacgccgccgtatcgacaagattccgggacttccctctctgaaaacctcccgggcggcagattacttcagagatttgaaggagacagtggaaaacaccagccagtatgtgcatacctgggacggagagctgtatctggagtatcaccggggaacctataccagccaggcatacaataaacgcatgaaccgcagcatggagcttctctaccgcagggcggaaatgcttacagtcctggaagccttgaaatatggaaagctgtccgctgcccgtcaggataccctgcgggaggggtggcacctgatcctcaccaaccagttccacgacatcattcctggctcctccattcatgaggtgtatcaggactgccataaggattacgccaagattgaaaatatcgccgcagaggtggaacgggaatttgaagctcaggtcctggagcagaaaccccatgggtatactgtgtttaacagcgcaggctgggagctggaggagctggtggagatccccatccaggagaagggcagctttacagataaagaaggaaaccttcttccctcccaggcaggagaaggagttgcctatgtatacacaggcaaggtgctgcctcttggaacaaaggagatttatttctcctgtgaggagaaggaggaagagggaaccgccttttctgtcaatggccggaacgtggagacacccttttattccatcacctttaatgaatatggacagatcagccgtctctatgacaaggaatttgaccgagaggtgttggccccgggagagaggggaaatgtgcttcagatgtttgaggataagcccattgacaacgacgcctgggatattgatattttctaccagcagaaaatgcgtgagatcacagagctgaaaagctttcaggcagcagagtgtggcagcctgcgaatgaggatccgcatggagtggaaatacatgaattccaccattatccagaatctcattctctacagcagggacagaagaatggatttccagacctatgtggattatcatgagaggcagcagcttctcaaggccgctttcccggtggatatccgctccacctatggaacctatgacatccagtacggcaatgtgcgccgtcccaatcactggaacacaagctgggatcaggcacgcttcgaaagcgtggctcaccggtttgcagacctgtcagagcgggattatggggtcagtctgctcaatgactgcaaatatggctatgatattaaggacaacgtgctgcgtatttccttgatccgcgcaggacttcagccggatcatctccaggatcaaggagaacatgtatttacctattcccttcttccccacagaggagatttcgtggagggcagaaccgtacaggaggcacatgccctgaataatcccatgaaggtcatggcaggcatcagcacactgccaatggccagcgcagttgctttcgacagccaggccgtagaggtggatgccctgaaaaggtcggaggagggagagcttctggtgctccgcttccatgaatatacaggctccagacagaaggtcactgtaaaaccggggtttgcatacgcagcctggtgtgagggggatctaagggagcgtcctcttggagagatccatacaggagaagtgtgtgtgacgcttcatccctatgagatcaaaacacttttatttaccgtttaactctagaaggaaatcccgctgctttcatcttcaagaaacagaagcggcgggagcgattaaaaggcaagaggcaggagggcggctggaatccgtcccaccaaaaagaaggaggtgcttccatggggagcaaggggatcaatctagagaagattttggatatctgtgagaaactattatattttgtgggcattaattttctgtttttattgtccaatctacctgtgcttctattctttttgtttgtggggagcagtcaggtccgcatctgccttcccttgtttcttctgtgcatggtgccctttgggcctgccctgtcagccgtgtttttttccatgaaccggctgttggcaggacatgaaaccggggcattcagagattataagaaaggctattcaagcgatctgggccagaagctggtcctgtgcgccggacagcttctggtgctgtgggtcctttggaccaacgtggaattctttggggttcaggtacccattctgccgctgatggttctgtttgtgattttatttgcggcagtcctccttgtgaccccaaacctctatcttttagcctccaggtacaagatgcccatcaggcagatcattaaggatgcttttatcctgcttgtcaccagaccggggatgcttctgggagatgtggcagctctggcgctgattcttatgtttttggaaatccaggcaggaacaaccgtcctgtttatgggaagtgtgtatggctttctgatcgtgttcatgcaccggcatattttttatagtttggaagagagccaatgacaccggctctcttttttgatatactggatacaacataagatattgcttacatacaagggagggcgggaatggagaaaactaaggaacagcttccgaataagcttttttttacatatacagcggtgctggtggtgatcgtgggaattctgatgatttattttatcacctccaccagaaccagaatcttaaatacaaatctggattacctggagaaaatggaagaggaggtcatggaatacctaagggaggatgcatccttcaccaactatttccacggtgatctgtaccgctccagtaccgtgatggaggatatggaaaattatctgaagctggatgcagaaggctatctcagccgccatctggacgattatgcagcttccaaccgcctggattacagagatctgtatgactatgtggagggagcctttgaggtatcctcccagctccagagagtggagatcatcagcacctccaaagggactttgacggaatgttaccgggacggcagtttttttcctggaaaagatgcaggggagcggatccaggaaatccggggcggtactacggccagggaaagagagatcgcctttccctgcgaaatccgggatgcccaggagggggagaccattggttatctcctgatgattttttccacagagcttttggaagaaattcaggcacggtatgaaaaaaatgatcttatccttttccagaagccagagaacattgttttgggaggggacaaggattatgtgtgggagaaggtcctttatacggaacgcaggaatgagctggaggaggaactgagggcttatatacatacaggagagctggagggctaccgggttctgtgcatactggacagggacaaggcagcacagatgccatggccggccattctaaccatactggggatcggagccggactctttttgctgggagagcttttggtgagactgtatctgcacagacttacggctcgtctggtgaagatcctggaagggatgcaccgggtcactaccggagatttgaaggtgcgtctgccctattctgagcgtggagatgagctggatgtgatctccaaaaactttaatgacatgtgcgagaatctggaccggtatatccagaagagctacttggccgaaattgaacagaagaacgcagagatgcaggcccttcagaaccagatcaacccccattttctctataacactctggaagccatccggatgaaggccatctgcaacggggacagagaggtgggaaaaatgctgtacagcatggcggttaccttccgggcccagcttaaggaggcagatgtgatcaccttgatgcaggagcttcattactgtgaaaaatatctggagcttttccagtaccgttatcagggacggtttacttcaggggtggaatgtccctttgagctggccaatgtacccatcatcaaattcgttctgcagcccctgatcgaaaattattttgtccatggtatccgtatggacagggaggacaattttatacagatccgggcagaacgggtgctggagcgggtgcggatcaccctggaggacaatggctatggaatgaagcagagggatatggagaaaaagaatcaggaactcagagaaaacaaacgggacaatcgcagctccatcggcctggacaatgtaaattcccgggtaaaggcagtgtatggaaacgagtacggcgtatgcttaaggccaaggccggacgggggcatgtgcgtggtgctggagatcaaatatgaggagggaaaaaactatgaagacagtcatgcttgtggaggatgaagaatttattctggagggacttcaaagtatcattgactgggaagctctgtccatgaaaattgtccatctggcccgaaatgggaaagaggccttggagctgtttgagaaagagccggttgacattgtggtgacggacgtggagatgccggtgatggacggccttggctttttggaagagctgcgcaggaaaaatacaagaaccaggtgtatcatccttacaggctacgatgaatttgaatatgccagaaaggcagtgcctttggatgtggaggattatatcttaaagcccattgatgaagagaagctggagcaggtgctgcgcttaagcagccagagactggaggagatggacagcagcaggatcgacgtgatggaggaccagatgggctggaagcgatatctggagggacggcttgacaaggagcaggcagctgagtatgaggagcttcttcccacgatcaacacagacagggagcggctgtacattgctttgatgaatatagaggaaaaaagcctgaaggcaaaaggaatgggagagcttttggcgtgtctgccaggggagaacaagaagctgaagcctctgtatttaagtccggcgaatcttctgttgtttctgtattggcaggaggacgagaaggaggaagctgtcctggagtatctgtctgcccttcaggaccatctggagcaggagctgggaatctttacttttatcagtgtgagcagcggtttgaaagagaataaggagctcccccaagcttataaaatctgcagccgtctccaaaaatataaaatgatcgacggctatggaagctgcatgaatgagtcccatattcaaaaccgcacctccagggatgtggggatcgatgacatgagtctaagaaagatgatcctgaaaaaggacaaggacggggccattaattacatagaggatctgtttattaacaatgtgcgggacggggtggatgtggacgtgctttaccagctgtccttgaagatcgcccttctgctccatgatatcaaatatgaatataagctgggtgaggccggacggatgaaggacctgacggagatggtagaaaatatttatcaggcagaggacctttatgttataaaaacggtatttatctctgagatcacgggtattatcacccagcttcacacagaggattcccattacacccctgtggtgaagcagctcatggaagaggtgcacaagaactacagggaggacatgaacttgaagaccctggcctataaatatcatatgaatgcctcctatctgggtcaaatcttccagaaggaggcaggatgctccttcaatcagtatctgaacaatacgaaaaacgcaattgccaaggacctgatcttaaataccaatatgaagatcattgatgttgcaagagaggtgggatatccggacaccagctatttttatcggaagtttaaacagtgctacggagtatcacccgcctctttaagagatatgaagaaatacgacattggcacagtgtaaaaaatttattcttttcttgtgaagcctcctagaaaatgtacaagaaacctaaaagttttcgactaggaatccggcctgcttttaaggtatagtaaatatatacaaaaaagtacggtcggatgccaagccggcgggtgatttgacggtacataagagggaggttgttctattgagtagtaagaaagctccaaaacaaagcggagggccaaattttctgacccgccttaaaatgaataaggaacttttagtcttaagcattccgggagctgtgtggttcctgtgtttcgcttatcttcccctgttcggtattctggttgcatttaaaagataccgactgtcaggcagcttttttcatagcttaataaccagtgaatttgtagggctggataatttcaagttcttgttctccagcggcgatgcgtggatcgtactgcgcaataccgtgctttataatttgtgctttatcgtcctgggcgtagttcttcccatcatcatggcgctgcttttaaatgagctgagaaataagaccatggccaaggtttatcaaagtgccatgttcctgccttattttctgtcctgggttgttgtcagctactgtctctttgcattcttaaacccggccaagggttatttcaacagtgttcttcagcaatttggccatgagggtatatcctggtacaccacaaagtccttctggccgtttattattttatttatgagccagtggaaaggtgtgggctataacacagtggtttatctggcttccatctgcggcatcaataaggaatattatgaggctgccgtgctagacggagccaccaagtggcagcagatcaaatacatcacgctgcccctgttaaagccagtgatcaccatattgctgatcatggcaatgggaggaattttcaaggctgactttggattgttctatcagcttcctatggattctggtcctctgtatgatgtgaccaatgttctggacacctacatattccgggcgctgaagacaaacggcgagctgggcatgagctctgcggcggcattgttccagtcagtggtaggttttgtattgttaatggtgtgtaacaaggtggtatcaaaggtagacagcgaaaatgcgctgttctagaaaggaggaaaattatggcgtattcgtttgcccaaagacggcgggagaaaaagctggacaaggagatccgcaagattgaagagcagcagtgcgagtggaataagattaaaaaacccacaaatgtggtcattaatattttcctcgccctttgttctctgcttgcagtcattccttttatctttgtaattattatttcactgacagatgagcaggtcctcaccatgaacggctatcggttcattcctgagaaatggagcctgtatgcttaccgctatattatagaggcaggggaaaatattatccgcagctatggggtgaccattttagttaccgttgcgggaacggcgctgggacttcttctcacaggaacctatgcctatgcgttatccagaaagacctatgcctatcggaagttctttacaacggtcattaccattcccatgatgttctcagggggaatgatcgccaattatctcattgtaaccaaggtgcttatgctaaaggacagcgtttgggcgttgatacttcccctgtgcctgaattccttcaacattattgtgttgagaacctttttcaagaccagtattccagattccgtagtggaatcggcaaaaattgacggagcctccgagtggaagctgtttttcaagatcatcattcccatggctctgcccggacttgccaccatcggtctgttcctgaccctgggttattggaatgactggttcaatgccatgatgtatctggacagcaaggactgggtaccccttcaatatctgctgatccagattgaaagctccattgactggctggccagcaataagtccatgctgggtgtggacggcatcactgccgcagccaacctgcctaaggagaccattaaaatggccattgtggtgatctccaccctgcccataatatttgcttacccatttttccagagatacttcgtcaatggcctgaccattggctctgttaaggagtaatagtaaaaataagtttgatcataagcgcttagctatgaaggaggttttcaaatgaagtacaaaaatatgaaaaaagcccttgcccttacgctggcaggagccctggcagcgggaatgctggcaggctgcggcaaaaagtcagccaccaatgaaaatggagacgaggtggtggagcttacctggtatcaggtgggagatacccagaaggatgccaagaaggttattgaaaaggttaatgaatatacagccgagaagattggtgtaaagttaaatgtgataaacgtaggctggggagactacaatcagaaaatgcaggtggtgatcaacacaggtgataaatgggatatgtgcttcacctgctcctgggcgaatgattatctccagaatgtgaacaaaggggcgtttctggagctggacgagctgctgaaaagtgagggaaaggatgtgtatgaggcggtggatccccgcttttgggaagctgccaaggtaaaaggaaaaatttacggcgttcctcacgagaaggagatcggttcctgtcccatgtgggttttcacaaaggaatatgtagacaaatatgagattccataccaggatctgcacaatctggaggacctggagccctggcttaaggttatcaaggaaaatgaaccggaagtggttccgttttatctcaccaaggattattctgctcccacctatatggataaaatccaggatcccatcggcattgaatacggagacgagactctcacagtgaaaaatgtgtttgagacagaccggatgctggaaacattagctaccatgagaaagtattatgaggcgggttatattaataaagatgcggcaactgcatcagacgataagtctgtgaagcgttttgtcacaaaaggcgacggtcagccttatgcggaattaacctggggaaaggatctgggatatgaggtggtatccagtcccattatggacacccaggtgacaaatgcgtccgcccggggcgcactgacagccatcaacaaaaacagcgagcatcctaagaaggccatggagttcctgaacctgttaaatacagaccaatatttaagaaacctgatcaactatggaatcgaaggagagcattgggataaggtggaagtggacccggaggaagccaaagcggcagagggcaaggcgtatatctacgactataaggtgaagttaaaccaggagaccaaaaaggattattctgttccctactgggtacagggcggattatttggcacctgtgtattggaaaatgagcctattgacaaatgggcaaccttcaaggaattcaatgacagctcccaggaagcaccctcctttgggtttgactttgacctgagcccggtaagcacgcagatcgcaggctttcgaaacgtgctggacgagtttggaagatccttgtatactggttctgtggatccggatgaatatgttcccaagcttctgaaaaagctggaggcaacaggcgtccaggaagtaatggaagagatgcagagacaaattgatgagtggaaggccggtaagtagaaaacaacactcctacaattgaagaaaaaagcagcccttttgggcagagcatggaacagccggcttgtgggagccggctttttccctgcatagattgaaagaaaggcaggaggatgacaatgataattcagtatttaagagataattggataatgaaggccgtgcaggagcaggtgtggcataaggcagtggtccctgggagcgtatacacagacctgctaagagacgggtctatagaggatccttattggaaggacaatgaggacagggtgtgtgccttaatggaaaaggactatgaatatcgctgccaggtacagacggatgggaggctgctggcctgcagccaggttcttctgcgctttgagggcctggatacagtggcggatatttatgtgaatggaagctatctgggacaggccttgaatcagcaccgggtctgggagtatccggtgaaggagcttttgcatcagggggagaatgaactgcgggtggtgatccgctcacccctgaagtggatcgaacaggcccataagacctatggaactattggaaatgaggatacctttgagggcttcatgcacctgcgaaaggcacattatatgtttggctgggactggggagcacatctgcctgacggggggattttccgtccggtgaagctgctggggattcagggggccagaattgacaatgtccacatccggcaggtgcatgaaggtggaaaagtgaccctgaacacccaggtctatgtggaaaaagtccgcaaggagaaggtgcattttaccatagaccttctggatccccaaggcagggaggaatatctggggatgttcagcgaggaggcacaaatgccttattccatacctgtggaaagcccccggctgtggtggcccaacggcattggggagcagcccctttatacgctccgggtgaagctgctggatgaagggcaggagattctggatcaatgggagggacgcataggcctgcgcaccatgaccatgagacgggtaaaggattcgtggggggagacctttgcccatgaggtgaatggaagaacgatctttgcaatgggagcagattatattccagaggatcatctgctgggacaaaggagcccggagcgcaccaggcagcttttggaggattgtaagctggccaattataactgcatccgggtgtggggcggcggcttttatccagatgactggttttatgatctgtgtgacgagctggggctaatggtatggcaggattttatgtttgcctgctctgtctatgagctcacgccggaatttgagtccaatatccgccgagaatttgcagacaatattaaacgaatccgccatcatgccagcctgggcctgtggtgcggcaacaatgagatggagatgtttgtggatgaacggtgctgggtgacaaaacccacggaggtgagggattatctttttatgtacgagcggatcatccctgaggttttgagggagtatgacccggataccttttactggccggccagtccctcctctggcggctcctttgacaatcccaatgacccggaccggggagatgtgcactactggaaggtatggcacggaaaccgtcctttctccgagtaccggaaattcttcttcagatatgcttcggagtttggctttcaggcctttccttccataaaaaccctggaggagatcaccgatgaaccgggagatcggaatcctttctcttatatcatggaaaagcatcagagaaattatggggccaatgggaaaattatgaactatatgcagcagatgtaccggtatcccaatgatttttctacctttatttatgcctcccagcttcttcagggggatgccatccgctacggggtggaacatttccgaagaaaccgcagccaggaccggtgcatgggagctgtgtactggcagctcaatgactgctggccagtgatttcctggtcctccattgattattgcggccgttggaaggctcttcattattatgcaaaacggttctttgccccaatactgctttcctgccatgaggaaggctggatgacccaggaggcgaacatgaaccggcagcatttccagtttgagaaatccgttcacttgaatgtggtaaatgaaactctggaggatgaggagatcacggtgagatggtgtgtccgcaatgcagatgcccgtgtggcggactgggtccagcctgtggaggagaccgtgagggttccggctcttagtgcggtctggctggagaagaaggagctgccggaccttgacgtgttccgggaatatgtcagctatgaggcctggaaaaaggaggaatgtatttctcagggaacggtgatcttttcctatccgaaatattttaaatatgaggatccccatctttatgtggaaacagacggggagtatgtggaagtccgggcccaggcctatgcccgttgtgtggaaatcttaaatgaagaggaggacctggtcctggaggataattatttcgacatgaatgccgggacaaggcgggtgaagatccttcggggaaaccccaagaagcttaaggtacgctgtgtgtatcacattgggtgatccctttacgggcggcggacaaggaagacaggcggccccttaacaaagttgggagaacttcctatataacaaaaagagcagtaaaaagcctaaggaggaagctttgttgctgctctttttaaatatacgattccactgctccagggcactttaaggcagggctattccttcatgcggggcttaaagatcaggctggccagataggagaagatcagggctgccgacactccggcggcgcaggcagtgaagccgcccatgaaaaggccgataaatccgttttctttgatggcatccagcataccctgccacagaagatggccgaatcctaaaaggggtacagtggctccggcccctgcaaagtctgcaaagggcttgtataggcccacagcgctgaggacagcgcctgcgcatacaagcagcaccatgatccgcccaggcatcagcttggtcttgtccagaagaatctgcaccagggcgcagataatacctccaactacaaaggcttttacaaattccatatgaaatggctcctttcttaatcagggatgtgttccaccaccacggcctgggcaatgccaggcaccgactgtccttcgttaaagctcacttttgacaaaagggcgcctgttggaacaaagaggatgcgtttcagctctccggcggtgatcttgggcagcagataggaggtgaagactgccgcggagcagccgcagccgcttcctcccgcatgagtatcctgggcttcgttgtcgaagatcagaagaccgcagtcccggtgctgcttggagatatcaaagcccttgtccttgagcaggtccagaaggatcttctggcccaccacacccaggtcgccggtgacgatcaggtcgtaatcctctggcatccggttaaaatccatcaggttctggtatatggtatcgcaggcagcgggagccatgcagcctcccatgttcagggaatccttcaggccgtagtcaatgatctttccggtggtgagccctgtgatcaaggccttgccgcctttgtcgctgagaatgcaggccccggagccggtgacggtccaggtggcggacaggggccgctggtttccgtaacccagaggaaaacgaaattctttctctgcgctgccaaaatggctggaggtgatggagagtacataatccccataccctcctgctacggccatggcgcccagggagagtgcctctcccatggtggagcaggccccgtacaggccataaacagggatttccaggtccataatgccgaaggaggaggcgatggtctgagccagcagatcccctgcaaagatcatgcggatctggtcattggtcaggcctgccttggcaataagcatctgggccgcctctttctgcatggtgctctccgctgcctcccagctgtcggtgccgaacatgggatcctggcagatcaggtcaaaacagtcctttaagggaccttccccttcctttttccctaccaaagagaaatgctctacaatgtgtacgggttctgtgaaggagatactttgttttccgataaattgttttttcatgcgcctgctacccccaaaagtgttaataagtaataaatcactcccagcacccaggagctgaagattccatacaggatcaccggtcctgcgatggtgaagatcttgcagccgatgccaaagacctgtccctctgtctgaaactcaatggcggacgcggccacagagttggcgaagccggtgatgggaaccaaggcccctgcgcccccgaattttccaattttgctgtaaagattaaagccggtgagaatgacactgagcaggatcaggagcatggagcaccaggtgcccgccatgtccttggataagccggcacttttggcaaaatgaaggataacctgtcccagggtgcagaaaagcccgcctaccaggaatgctttggccatattcaggggaaggctgtgagtgggagttacttgttttacatatttctcatattcttttgcttttttttcctttgcgatatttggcataagatccttcctttacacttttttatagtgtttcccaacaccaggaaattttatacatagcctcctctacgtccagccctggtagaagtaaaacaaagcgcccagagattttgccagggcaatggtgacaatgacccaggagatgccggcgctgaatttgatccggcggcttaaaataggaaatacgcttgccatttccgccagagccaggatccaggcccccaggaagattccggcagataaaccgaagacggccagcccgataccaccggcagggattttccactgaaaaatgtagaaaagatttccaaagacaatacccagcatggaaatatcttcataaaataagattttatcaccggtgtgggtgacgcctgcatacctggggacaatggacagaccgatgatcaggcccaccagccctgccgacaccacgcttccggcacaaaggcctaaaaaacccagaaaaatttgctgccacataatggacttcctttccgctgcttttttggttattatgagaaaaaaagcagttctttattcttcctcatgggaaaagaggaaaatataggaggtatttttaaaggatttctaaagaaagtatgaaaaactgtactttttcccgtggggatagtataataaaaattaattacgcacttttagaaagcgtgtaagctttttgacaaaaagataccatacaggaggacctcgtatgctcaatgaattttcgcgcatggagattttgttgggggagaaggggatggacagacttgcatcgtccaggatcgcggtttttggccttggaggtgtgggctctttcgtggtggaggcactggccagatgcggcgtgggcagccttaccctggtggacaatgataccatatccattaccaatattaacaggcagctatatgccctgcattctaccataggaaaatcaaaggctcaggtggccaagcagcggatacaggatattaatggagatattctggtacacacctatgagacgttttttaatgaagagacagagtccatgtttgatttttcagcttatgactatgttgtggatgccatagataccgtgtcgtccaagctgcttctcattgagaaggctaagaaatgtaatacacccataatatccagtatgggtaccggcaacaagctggagcccggacgctttgagatcgccgatatctcaaagaccagcgtgtgccctctggcgaaggtgatgcgcacagagctgcgcaaaagagggatcaaaaaagtaaaggttttattttcaaaggaaaagcccattaagtctggggagacagaagaagtgaagggaacagcccgccggcctgttccgggaagcatttcctttgtgcccagcgtggccgggctgatgatcgcagcagaggttgtgaaggacctgctgggagagctccggggaaagaaataagcataccggctggaaccaaggtgtccaatgtggttttaaggtatgattttcttccttggagaatagtgattataaaaaagcgaggatcgtatttgtgaaagataagacagtaaaattattctgtgagactttaggagaggagcaggtgcttgttgatgagcccatgtgccgtcacaccaccttccgcatcgggggcccggcagattattttttaatgccccaaaacagttcacaggtaaaagaaattataaagatatgcagtcaggagaatctgccctggtttattttaggcaatggaagcaatcttctggtgagtgacaaaggctaccggggagttattctccagatttataagaatatgaatgccatagaaattcagggagaatgtctgcgcatccaggcaggcgctcttctgtcctctgtggcacgtcaggccatggaggaaagcctcacaggctttgagtttgcaggaggcattccaggtaccataggcggcgcctgtgtcatgaatgcaggggcctatggaggagagcttaaagatgtgcttcaggaggttacggtgatcagccctcagggagatctgctgcagctttcttcccatgagctgaaaatgggataccgtaccagcctggtgaaggaaaagggatacattgtgctggaagctgtcatccgtctgaaaaagggcggcaaggaagagatcaaggcacggatgaaggagctgacagagcagcgcacctccaagcagcccttggaatatcccagcgcgggaagtacctttaagcgtccccagggatattttgcaggcaagctgatcatggacgcaggccttcggggatacaaaaagggcggcgctcaggtttccgaaaagcactgcggttttgtcatcaacaccggggaggcaacggcccaggatgtgcgtgggctcatggaggatgtgacggctgtggtaaaagacaagtttggcgtaaccctggagccagaggtaaaattcctaggagatttttaacaggagagaaaaaagtatgcgctttgttattgtaacaggagtctcaggtgcaggaaaaactgctgccttaaaaatgctggaggatgccagatatttctgtgtggataatcttccaatccctttgctggaaaaatttgcatccattgctccggatatgaatctggaggaagtggaaaacatagcattggggatcgatgccaggagcggacgttccttcggggagatggagcagattctggacaatatgaagaggctgggttatcagtatgagatcctgtttctggatgcggatgatgccactttggtgaagcggtataaggaaaccagacgaagccatcccctggctcccaacggaagggtggatgaaggcatccgaagagagcgggagatgcttaagttcctgcgccagcgggcggattatatcattgacaccacccacctgctcaccagagagctgaagcaggagatggataagatttttgtgaacaaccagaacttccagagcctgatggtgtccatactgtcctttgggttcaagtacgggatcccaacggatgcggacctggtgtttgatgtgcggtttctgcccaatccttactatgtggatgagctgcgccctctcacagggaaagatccggaggtatttcaatatgtgatggattcccccattgccaggaaatttgcagataagctggaggatctggtggagtttcttattcctcactacattgctgaggggaagacaaatctggtgatcgccgtgggatgtacaggaggcaagcaccgctctgtcaccctggccagagagctgtatcacaggctttcccaggagaccggctacggtatccggctggagcacagagatattgagaaggataccttaagaaaaaaagaaccgggagaataaaatgtctttttctggaaaagtgaaagaagaactttccgggcatctgggcagtgccaggcactgccagatcgcagaactgtcagctctgctcagcttttgcgggagagtggaggttaaagaaaaggatcagagggtcctcatccttcagacagaaaatgaagcagttgccagaaagtactttacattattggaaaaaacgtttaatataaacactgaagctaataatagaaagctattgtatcaaaaaaagggaaatgcctattttgtggaatgtctgatgtgggaggactgccggaaaatattgcagagtacgaaacttatggctttgtcggaagagggctgcggtcataggcagccggtaaatccagtggtagtgcagaaaaactgctgcaggcgggcgtttatcagaggggcatttctggcagcgggttccatgagtgacccggagaagggataccattttgagattgtctgcccttcagaagaaaaggcacgtcaactgcgggatatgatccgaagctttgagatagacgctaagatcgttatgcgcaagaagtcacatgtggtatatgtgaaggaaggctcccagatcgttgatcttttggcggttatggaggcaaacatcgcgcttatggacctggagaatatccggatcctgaaagagatgcgcaattccgtgaaccgtaaagtgaattgtgaaacagcgaatatcaataagaccgtcaatgcggctgtgaagcagatggaagacatccgtttgattgagaataccataggtttagaaagcctgggaggtggactggaggaaatatccagactcaggcttcagtttccagaagcaacattaaaggaattaggaatgatgttgaccccgtcggtgggaaagtccggtgtgaatcacagacttcgaaagctgggagagatcgcagaggatctgcggggcagcaacaaggaggaattattatgatcaaaagaccaattacaatcaatctgtcaaccggactggaagcgagaccagtggctcagttagttcaaattgccagtcagtttaacagcgaagtccacgttgaggttggtgagaagaaagttaatgccaagagcattatgggaatgatgacactgggactggatgccggagaggagatcatcttatctacgaacggagaagatgaggcagctgcaatggacagccttgaaaaatatttaagcaatcactaatcctcttaatctaaaacttgatatggaaaccaacagccgccatacatctgggtatggcggctgttttgtaccggaagatccggaaggtttctgctgagagtgggaaagtatgggaatctggttatgctttgggctggaatattttttttatgaccatagggtgtccggccaggatccacagaaccacaagaaaatacctgagaaagctgcctggggcattttggcccaggattggttttaatccctgctggatcaaaagggtcacggcgatgcctgtgacaaagcacaggatacgggacttccaggtatccggatgacagaagcggatcttcgttctttctatataaaaaccaactccgaaggccgcccctgcaccggaggctttcagacagtccagggcatagtggagctggatggcgccggaggaatatagaaagaaggagtaaccggccagcagcagggatactgccacaaggatcagcgcggtcctaaggtcatgggtggtctgggattctctccgataaaagatctggaagaccacagcggacaggacaagagagattcccatggctgtcagcacatcctttggcgtatggcagcccagatacattctggagaaacccaccagaaggaaaaggcatacacataccagcttctgctgccatttccgggctgccagggccagagtggaaaaaagggaggtgctggactgtgtgtggccgctgggaaaggaatagcctgttgccccagggacagctgagggcactgcctggaaattgggatccagaacccagggccggggaatgcggaaggtgatcttcagtccttgaaccaaaaggccggaagaaaagtaggtaaagcccagggtgtagcccagctttttgttctgacaccagaaaagccagcagatcacagctacggcaaagacctcctgacccaggtaggtgaagccctgaaagatggtttcacccccaggggttcggaaatttgcaagccagttaagaaaatccattgatttatcctccttaaatatgaaaaaattctctatctttccccacaggaaaagattataagttgaccgaaaaagaaaaaaagggtatactgtatctgatatattatcataaaacagttcataagtatacaagagcgaggagcgtttttgcaatgtcaaaatttttgaagtttctggtgcactttatcatcatctgtatgatcctttgcgtgctggcgatttttctgccgccgctgttcggagtgaagacaactgtcatggacggcacttatacggatacgaacctggtgctgggctccgttacatattcccaggaagtgagcatgggagagatccggcagggagattctcttacagtggtggaaggcacatctgcacatcgctacgatgtgatctccctggacaacacaaagggaacctgcacagtgaaggatcccaccatttccggtgagtccacggcaaccatatcggtaaagaacggcgcctggagagctttgttttcggtagaagtcattggctttcttctggtggctgtccagagcaggcagggactgatcgttttgggattggcagtgctgatcctgatcattctttatattattgccgagctttggaaaaaggaaccctcggaaaaagaggggcgggaggaagcttctgccatctatgtgaaaagcgacaaggaactcaaggaagaggataagcaaagagagaggcagcgcagggaagaggagaaggcctatttggctgagaagaagattgtgaatggagaaactgcagcacagagaaaaatgagattaaagcaggagaagctggaagaaaaggccagaaggaaagaggagaaggctcgtctgaaggcaatgaagaccgtgcgcacgggcggcttcattgatgagatcgaggaggacgacctggagctggaggctgaggagcatgatgcaagcactgttcaggccgctaccagcgaggcccacgaggagctgaagaaggagatcgccgcagctacggcggaagttccagaggaagctcccaaggaggcttttgtgccggagatccccctggagctgctccagccggaagctgcttcggaggaacaaaaggctgaggagaaacccgccagggaagagccggagcctcagacccctcaggagattaagaagatggccattcccctgtatactgctgcagcccttgcagagaaggtccgggccagtggagatgctccggaggttatgcgggatgagatttccaaggtggtgctttttgattattcggatattattacccagggcggttcagatccggagagatagagccgggaacgctccttgctgctggaacgcattctgctatatataatgaagaaacatatcaggacagatacaagcagggaccggcttttgccggtcctttgtgcattaacagaagaagcggagtatcctgactgacagacaggggactgcagctattgtcagcttctgtataagaaaaaatacaaaaaataaaaaaaatctcttgcaattagaagattcattgtgtatactgataactgctgtgacatgatagcaatgaagcgagaggttgctgccctttggaggcaggttttccgtggagcgaatgtcaagttaggaaactgacgacaagtcactgtacaagttcagagtgtccatccccagggatggaaggagtgtgaggtcacaaggacacacacggagatgtgtacagtcgccgcttgtcgtactgctaataagtacgaataggaggagactttttttatggcaaatcaggtaatgagaattacattaaaggcatatgatcatcaattggtggatgcatcagcagccaaaatcatcgaaactgttaagaaaaacggagcaatggtaagcggacccgttccccttccaactaagaaggaagtggttacaatcttgagagcggttcacaaatacaaagattccagagagcagtttgaacagagaacccacaaaagactgatcgatattctcaccccaacccagaaaacggttgatgcattgtccagactggaaatgcctgcaggtgttcatatcgacatcaaaatgaaaaataaataatcagaatcactctgatgtttatgaattaactatatgattgcccaagctggtaatccgctataaggaggaaaaaagaatgaagaaggctattttagctacgaaagtcggaatgactcagatcttcaacgaagacggaactttagttccggtaactgtattacaggctggtccttgtgttgttacccaggtgaaaacccaggagaacgacggatacagtgcaattcaggttggatttgcagataagagagaaaatctggtaaacaaacccgacaaaggacattttgaaaaagcaggcgtatcctgcaagagatatgtaaaagaattcaagtttgagaatgccgaagagtataccttaggtcaggagatcaaagctgacatctttgcagagggcgagcacattgatgcaactgccatctctaaaggaaaaggcttccagggcgccatcaagagacatggccagtccagaggacctatggctcacggttctaaatatcatcgtcatgcaggttccaacggtgctgcatctgatcccagcaaggtgttcaagggcaaaaaaatgccaggacatatgggacatgagcaggtgactgttcagaatctggaaatcgttcgcgtagatacagaaaacaacttactgttagtaaaaggtgctgttccaggacctaagaaatctttggttactatcaaagagacagtaaagtccttataatgagaaaggaggagcatcagaatggcaaacgtaactgtttataatatggaaggcaatgaagttggcacaatggaactgaacgatgccgtgttcggcgttgaagtaaacgagcatctggttcatcttgcagttgtacgtcagcttgctaataagcgtcagggtactcagaaagcaaaaacccgctctgaagtacgcggcggtggaagaaaaccgtggagacagaaaggaacaggtcatgctagacagggttccatccgtgcaccacagtggacaggcggcggagttgtatttgctcccgtaccaagagactatgaagtgaaaatgaacaagaaagaaagaagagcagctctgaagtctgttctgacctctaaagttcagggaaataaattgatcgttattgacgatctgaagttagatgagatcaagacaagagaaatgcagaaggttttaaataacctgaaagcagagaaggctttggtggttaccgctgattttgacaacaatgtgatcatgtctgcaaggaatatcgctgatgttgaaactgcaacccccagcaccatgaatgtgtatgatgttttgaaacacagcaccgttgtggtgacaaaagcagctgtagcatccatcgaggaggtgtacgcataatggcaagcattaagtactatgatgtgatcctgaaaccagttatcactgaaaaatccatgaacgctatgggcgagaagaaatatacatttctggtacatccggaagcaaataaatctcagatcaaagaagctgttgagaaaatgttcgagggtacgaaggttaagagcgtgaataccatgaacatggatggaaagaagagacgtcgtggaatggtagttggaaagactgccaagaccaagaaggcgattgtggctcttactgaggacagcaaggatattgagatttttgaagggctgtaagaagtacggggaagtaaaacaaaaagtttgttgagaagacttttcaagacggacgcggagtgcacttcggaagcggggcttcctcagtcgcgttgcacgcttacaagctttgaaagaaatgctctcttacgtgcgagggcacgacgagatcatttatttcaaatcttggcactctgctgggtcgcgcatatgtgcacgaaagcacgataataaattcgaaaggagaaacaaccatgggtattaaaacctatagtccatatacaccgtccagaagacatatgaccgggtctgatttttctgagatcacaaaagcaactccagagaaatctcttactgtgtcactgaagaaaaatgctggacgtaacaatcagggcaaaattactgtgagacaccgcggaggcggaagcagaagaaaatatagaatcattgattttaagagaagaaaagacaacattcctgcaactgtagttgcagttgagtatgatccaaacagaactgcaaacatcgcattgatcagctatgctgacggcgagaaggcatacattctggctccggaaggcttaaaagtaggccagaaggtgatgaatggttctgaggctgaagttcgtgtgggcaactgcctgccgttaggcaatattcccgttggtaccatggtacacaacgtggagctgtatcctggaaagggcggacagctggttcgttctgcaggaaatggtgctcagctgatggctaaggagggcaaatatgccaccttgagactgccatccggtgaaatgagaatggttcccatcgtttgccgtgcatccgttggtgttgtaggaaacggtgaccacaaccttattaacattggtaaagcaggacgtaaacgtaacatgggtatcagacctaccgtccgtggttctgtaatgaaccccaacgaccatccacatggtggtggtgaaggaaagaccggcatcggccgtccaggtccttctactccatggggcaagccggctctgggtctgaagaccagaaagaaaaacaaacagtccaacaagtacatcgtaagaagacgcgatggaagagcattaagcaaataataaggaggattagaacatgtctcgttcactgaaaaaaggaccttttgcagatgcaagcttactgaaaaaagtagacgcgctcaatgctgcaaacgataaaagcgttatcaaaacctggtcacgtcgttctacaatcttcccctctttcgtaggacacaccattgcagttcacgatggaagaaaacacgtgccggtatatgttaccgaagatatggttggccacaaactgggtgagttcgtagcaaccagaacttacagaggacacggaaaagacgaaaagaaatccggcgtccgctagaatttgataaaataaactgcctgttctcccttgggggagaaacagggttcagttttcacgataacctattgattatgaagaaaggaggcactcaactatggcaaagggacacagaagccagataaagagagccagaaatgagaataatagagagaccagaccgtctgcaaaattatcttatgcaagaatttctgttcagaaagcctgctacgtattagatgcgatccgtggcaaagatgtgcagaccgcacttggtatcctgacatacaatcccagatacgcatccagcgtactgaaaaaattactggaatcagcaattgcaaacgcagagaacaataacggtatgaacgcagacaacctctacattgcagagtgctacgcaaacaaaggacctacaatgaagagaattcagccaagagcacagggcagagcttacagaattgaaaaaagaacaagccatatcaccatcgtgctggatgaaagataaggaggaaaagcatgggacagaaagttaacccacatggccttagagtcggtgttatcaaagattgggattctagatggtacgcagaagataaattcgcagactatttagttgaggactacaatatcagaaaatttctgaaaaagaaattatacagcgcaggtgtttccaagattgagatcgagagagcatctgacagagtgaagatcattatctacacagcaaaaccaggtatcgttatcggtaaaggcggcgctgagatcgagaaagtgaaagctgaattacagaaattcactgacaagaaattaatcgtagacattaaagaagtaaagagaccagacagagatgcgcagctcgttgcagagaacatcgccctgcagctggaaaaccgtatttctttccgtcgtgcaatgaaatccacaatgcagagaacaatgaagtctggcgcaaaagggatcaaaacttccgtatccggacgtcttggcggtgcagatatggcccgtacagagttctacagtgaaggaaccattcccctgcagacacttcgtgctgatattgactatggcttcgcagaagcagataccacttatggcaaagttggtgtaaaagcttgggtatacaatggcgaagtacttccaacaaaaggaactaaggaagggagcgataaataatgttaatgccaaaaagagtaaaacgtcgtaaacaattccgtggctccatgaaaggtaaagcattaagaggcaataagatcaactacggtgagtacggccttgtagctactgagccatgttggatcaaatccaatcagattgaagcagcccgtgttgctatgactcgttatatcaagcgtggcggccaggtttggattaagattttcccggataaaccagtaacagcgaaaccagcagaaacacgtatgggttccggtaaaggtaccctggagtactgggtagcagttgttaagccaggacgtgtaatgttcgagatcgcaggcgtttctgatgagatcgcccgtgaagcattacgtcttgctatgcacaagttaccatgcaaatgtaaaattgtttctcgtgcagacttagaaggcggtgataacagtgaaaattaataaatttgtggaagatttaaaaaacaaatcagctgcagaattaaatgatgaattagtagctgctaaaaaggaactttttaatctgagatttcagaatgcaaccaatcaattggacaatacaagcagaatcaaagaggttcgtaagaacattgccagaatccagacagtaatcactgagcaggcaaaggctgcgaaatagtgaataggaggaagagaccgtggaaagaaatctgagaaaaacccgtgtgggtaaggttgtcagcaacaaaatggataagaccatcgtcgttgctattgaagaccatgtaaaacatcctctttacaaaaaaatcgtgaagagaacttataaattaaaagctcatgacgagaacaatgagtgcaatatcggtgataccgttaaagtgatggaaacaagaccattatccaaggataaaagatggagacttgttgaagttgtagagaaagtgaaataaggaggagaccagtatgattcagcaggaaactagattaaaagttgccgacaacactggtgcaaaagaaatcctttgtattcgtgttatgggcggctctacaagaagatatgcaaacatcggcgatacaatcattgctactgttaaagatgcaacaccaggcggcgttgttaaaaaaggcgacgttgtgaaagcagttgttgttcgtaccgtaaagggtgcccgccgtaaagacggttcctacatcaaattcgatgagaatgcagcagtcattatcaaggacgacttaactccgagaggaacacgtatctttggaccagttgccagagagcttcgtgaaaagaaattcatgaagatcgtttccttagctccggaagtattataggagggtgcatatgtcagctatgaaaattaaaaaaggcgatactgtaaaagtaattgccggtaaagataaaggcaaagacggaaaagtgatctccgttaatgtgaaagacaacaccgtaatcgtagaaaacgttaacatggtaaccaagcacagcaaaccatccgcagcaaaccagaatggtggaatcatcacaaaagaagctcctcttcatgtttccaacgttatgcttgttgtaaaaggccagcctacaagagttggtttcaagatggacggagataaaaaagtccgcgttgccaaggcaacaggcgaagttatcgattaataagagaggaggcattgaaagtgagtagattaagagatctttacaagaacgaaatcatggatgccatgaccaaaaaatttggctataaaaatgtgatggaagtgccaaaactcgaaaaaatcgtagtgaacatgggtgttggtgaagcaaaagaaaatgcaaagcttcttgacgctgccattgcagatatggaactgatcaccggacagaaagcagttgccactaaggcaaagaaatctgtggctaacttcaaaatcagagaaggaatgcccatcggttgtaaagtaacccttcgcggcgagaaaatgtatgagttcgcagaccgtctcatcaatctggcccttccgcgagtacgtgacttccgcggcgtgaatccaaacgcttttgacggaagaggaaactacgcactggggatcaaagaacagctgatcttcccggaagtggaatatgacaagattgacaaagtaagaggtatggatgttatcttcgtgacaactgctaagactgacgaagaagcacgtgaattactgacattattcaacatgccatttgcaaaataggaggaacgattcatggctaaaacagcaatgaaaatcaaacagcagcgcaagcagaaattctccacaagagagtacagccgctgcagaatttgtggccgtccacatgcttatctgagaaaatacggaatctgcagaatctgcttccgtgaattagcatacaagggacagattcctggagtaaaaaaagcaagctggtaagcttagcagttatctctggaataagaaatacctaaccatctaataaaagggattagaacaggaggaaaaaactcatgagtatgagcgatccaatcgcagatatgcttactagaattcgtaatgcaaatactgcaaaacatgataccgtagatgttccggcatcaaaaatgaaaatcgcaatcgccaacatcttactggatgaaggatatattgagaaatatgatctggtagaggacggcgttgttaagaatatccatatcacattgaaatatggagaagacaagaatgaaaagatcatcactggtctgaagagaatctccaagccaggcttacgtgtatacgcaggcaaagatgaactgccaaaggttctgggaggacttggaatcgcgatcatttccaccaataaaggcgttgtcaccgataaagaagcccgtaagcttcaggtaggcggcgaagtattggctttcgtatggtaataaaaaactcactcagttttttatatatataaatgcactgaaaacagagggaagcaagatctccctccgacaatctaagtaaggaggacacacgtatgtcacgtatcggtagactgccagttacggttccagcaggtgtaactgttgacgtaaaggaaggcaatgtagtaaccgtaaagggacccaagggaactctggaaagagcacttcctgtagaattgggcatcaaggttgaagatggtagcgtattagtaaccagaccaaacgacctgaagaaaatgaaatcattacatggtttgaccagaagcttgatccacaacatggtggtaggcgtatccgaaggatacaccaagactctggaagtaaacggtgtaggttataaagcagcaaagcagggcaagaaattagttctgtcactgggatactctcatccagtagaaatggaagatccggaaggtctggaatccaaggtagaaggaaacaagatcatcgtttccggtatcagcaaagaaaaagttggccagtatgcagctgagatcagagataagagaagaccagagccatataagggcaaaggtatcaaatatgctgatgaggttatcagacgcaaagttggtaagactggtaagaaataaataaggagagtgtgaaaatgataaaaaaagcgagtaaggcggaaattcgtcagaataagcatagaagattacgtcatcatttaaacggcactgctgcaactcctcgtttggcagttttccgttccaataagcatatgtatgctcagattattgatgacaccgttggcaagactttagtatcggcttctactcttcagaaagacgtaaaagcagatttggagcacaccgacgacgtagcagccgctgctgcattaggtaccgtgatcggtaaaaaagcgattgaagcaggcatcgagagcgttgtcttcgacagaggcggatacatttaccatggtaaagtaaaagctctggcagacgcagcaagagaagctggactgaaattctaaaagggaggaaaagaacacatgaaacgtaatcttattgatgctagtcaattagaattagaagataaagtagtgtcaatcaagcgtgttaccaaggttgttaaaggtggtcgtaacttccgtttcacagctttagttgttgtaggtgacggcaatggacacgttggtgcaggcttaggaaaagcagccgaaattccggaagcgatccgcaaaggaaaagaggatgcaatgaaaaaattagtaaccgttgccagagatgagaacggttctatcacacatgacttcattggcaagttcggaagcgcttccatgcttctgaaacgtgcaccagaaggtaccggtgttattgccggcggcccggctcgtgcggtcattgagttagcagggatcaagaacatccgtacaaaatgtatgggttccagaaataaacagaacgttgttcttgcaaccatcgctgggttaagccagttaaaaactccggaagaggttgcaaaactccgcggaaaatctgttgatgagattctggcataaggaggagaatgaacatggcaaacaaattaagagttacattagtaaaatctccgattggtgcagttccgaaacacaaaaaaactgtagtggctatgggtcttaccaaaatgcacaagacagttgaaatgccggataacgcagcaaccagaggaatgattcagcaggtgagccacctggttaaggtagaggaagtttaattaaaaaggaggtgccaacatggatttatcaaacttaagaccagcagaaggttctaagcacagcgataatttcagaagaggccgtggacatggttcaggaaacggaaaaacagccggtaaaggccataaaggtcagttagctcgttccggtcacaagaaaccgggatttgaaggcggtcagatgcctttatacagacgtctgcccaagagaggatttacaaacagaaattctaaggaaatcatcgccatcaacgtggacgtgctgaaccgttttgaagacggagcagaagtaactgttgaaagcttacttgcaagccgcgcaatttccaaatgcggagacggcgttaagattcttggtaatggcgagctgaacaagaaattaaccgtaaaggttgatgcggtcagcgagacagcgaaagcaaaaattgaagctgcaggtggaactgttgaggtgatttaatgtttgaaactctcaaaaatgttttcagagttaaggaaatgagacggaagcttttgtacctggttggtatgatctttgtgatccgtatcggttcccaactgcctgtcccaggagtggacagcagctttttcgaagagtggtttaaaggaaataccggggatgcgttcaacttttttgacgcattcaccggaggttcttttacccagatgtcagtgtttgcactgaacatcacaccatatatcacttcatccattattatccagcttttgaccatagcaattccgaaattggaagagatgcaccgggatggtgaagagggaagaaagaaactgactgccatcacccgttacgtgaccgtgggcctggctattttccagtctgttgccatggccatcggattcggacgtcagggtctgatccctgcattgaaacccagttccagtacagcgcttccggaaaaaatctggattgctttcgtggttgtggcctgccttaccgccggctcagcaatgttgatgtggattggtgaacgtattacggaaaagggcgttggaaatggtatctctattgtacttaccattaacattgtctccagaatgcctaatgattttgtgcgtctgtatgagaactttgtaaagggtaaaaccattgcaaagggaacacttgccgccatcattattctggccgttgtgcttgttgtagttgtatttgtattgatcttaaacggagcggagagaaggattccggtgcagtactccagaaaaatggtgggacgaaagatggtgggcggtcagtccagcaacatccctctgaaggtgaatactgcaggcgttattcccattatctttgcgtcctctctgctgtccttccctgtgatcattgcaacctttgcaggaaaacagaacagtacaggtgtgctgggagagatcttaagaggactgcagtccggcaactggtgtaatccaaatcagctccagtattcctggggtctgctggtctacattgcactgtgtattttctttgcctatttctatacatccatcacctttaatcccattgaggtggctgataatattaagaagcagggaggattcatacccggtatccgtccaggaaaacctacaacagaatatttgacgaatatcttaaattatattatatttataggtgcagtaggccttattatcgtggctgtcattccgtatatctttaacggtgtgttccacgcagacgtatccttcggcggaacctctatcatcatcgtagttggtgttgttctggagaccatcaagcagattgagtctcagcttctggtgcgtaactataagggcttcctgaacaaataaacaagtaaggttgtggtgtcatatcgccgcaaccttgatttgctaaatgcggaaatcgtattttggcggaaatggagggtatgactatgaaaatcattatgttgggtgcgcctggtgcgggaaaaggaacgcaggcaaagaaaattgcagagaaatatggaattccacatatttctacaggggatattttccgcgcaaacatcaaaaacggtacagagctgggcaaaaaagcaaagacctatatggatcagggcctcttggttccggatgaacttacctgtgacctggtggtggacaggatccagcagccagatgcagcgaaaggttatgttcttgacggttttccaagaaccattcctcaggcggaatgtcttacggatgccttgaacaagctgggaagcaagattgattttgccattgatgtggatgttccggatgagaatatcgtaaaccgtatgagcggaagacgtgcctgtctgaagtgtggcgctacataccatgtggtctatgcagcacccaaggcagagggcatatgtgatgtatgtggtgaagcactggtgctcagagaggatgataaaccggaaacggtgcagaagcgtctgaacgtttatcatgagcagacccagcccttgattgaatattatacaaaggcaggggttctgaaatctgtggacggcaccaagaacctggaggatgtattccaggatgttgttgcaattttaggagaataacacatgtcagtttctatcaagacagagcgggaaattgaacttatgagagaggccggtcatttgctggaaggtgtccacaacgaactggcgtcctatataaagccgggcatcagcacaaaagaactggattccatcggagaagagatgatccgttccctgggctgtacgccgaattttctgaactataacggatttccgggttccttctgcatcagtatcaacgatgaggtggtacacgggatcccttcagaaaaaaagatcatccatgagggagatctggtgaaaatagacgccggattgatttacaagggatatcattctgatgccgcccgtacttatcaggtgggagaggtctcaccggaggcacagaagctggcccaggtgaccaggcagtgcttttttgaaggtttaaaatatgccagagcaggaaatcatctgaatgatatttccaaagccattggggcgtatgccgcaaaattcggttacgggatcgtccgtgacctggttggacatggaatcggcacccatctccatgaagatccgcagattcctaatttccctcaaaagcgcaggggagtgcgccttatgaaaggcatgacccttgcagtggagccaatgataaatgccggaaaagcagaagtggtatggctggatgatgattggaccgtagtaacgaaggacggctctttatcggcgcattatgaaaatacgatcttgataaccgacgaagaaccggaaattttaacctataccgggaaataaagaatttgatcttagaaaaaaagcctgagatcaggagacagacagcaaagaggcacagatgtcctctttgactttgacaaatgacataggaggttgagtatgtcgaaagcggatgtaattgaagtagaaggtaccgtattggagaaactccccaatgcaatgttcaaggtggaactggaaaacaagcatgtagttctggcacatatcagtggaaagctgcgcatgaacttcattcgtattttaccaggcgataaagtgaccattgaactttccccttacgacttatccaaaggcagaattatctggagagataagtaatggcatgggtattcagtttaacaaaatagatgtgaaataataaggtgctggggcggctgcggccgcctccttttaaaataacaagaaatattcatataaaaatcgagatttttcttgagcagactcgtagaatgtattacaatataagaaatacttaggagggattttacgtgggaagaggacattatggtttatcagaagcagaagagcagatcatggaaatgatctgggagcagaaccgggaaatcggtttcagccaagtaatggattatcttgtaaatgagaaaggaagcacctggaaaaaacagacagtaaagacatacctggaccatttagtgaagaagaaagctctgtccagccgcaaggagggtaataaatgtatttattctccgtctatgtccaaacagcagtatatcagctactggacgaagaaagtgatggatgatgtatgtcatggttccctgaaaaatttaatcttagccttcaccggaggtgagcagattacgcctaaagagacagaagagattctggaactgttgaaaaaataaaaccataggaattgtggggaatttttatgagtaaccgatcaacctgaaaaggcctatgcaaaagtacagagctgtctgtcactttgcatcggctttttcttttgaagatcattgtcgtcagatcttctttgggatatggtctggacagtgacggaatgcactcccggaaacaagggtttttaaaatctttttgggaaaaaatgcttgcattttgtgaggggaagtgttacactataatccgagcgcgcggactcagcgtattttgtgcgcttgtaactacagactcagcgatacaacggaaggaggatttccagtgaaagtaagatcatctgttaaaccgatttgtgaaaaatgcaaaatcattaaaagaaaaggaagtatcagagtaatctgtgaaaatccgaaacacaaacagcgccagggttgattctatattatttgtgcacccccagcagggtgtaaatggtgttcgtttgttgtagaaacgtgcggctgcagtgtgagacacccggaagggttgttcagactgttttaaatatgttagagtcactttgtattgcctaataccgaggggcaattgggccggacaggccgcaatcttattcggaaaggtcatatcgtgccggatatggctgggtgttttaccgaggcaccccaattaggaacaaaataggaaattatggagaagcagttctctgagaggtaccccatttcaccggaaagaaatttccgtggtacagtaagagcagcttcagaaagaaaatggaggaaacagtacatggctcgtatagctggtgtagacttaccaagagaaaaacgtgtggagatcggacttacctatatttatggtattggacgttccagtgcaacaaagatcattgctcaggcaaatgtaaatccggacacccgtgttcgtgatttaactgatgaagaagtaaacagaatccgtgaagtaatcgatgagactatgatggtggaaggtgatcttcgccgtgagacagctctgaacattaagagattacaggaaatcggatgttatcgtggaatccgtcatcgtaaaggccttcctgttcgtggtcagaagacgaaaacaaacgcaagaacacgtaagggtccaaagagaactgtagcgaataagaagaaataatgtaacccaattattataaatgataaaaaggaaagcgtaggttagttttaaaatggcaaaagtgacaaagagaacgactacaaaacgtcgtgtcaagaaaaacgttgaacacggacaggcacatatccagtcttccttcaacaatactatcgtaacactcactgatagcgaaggaaatgctctttcttgggcaagtgccggcggtctgggatttaaaggttcaaggaaatctaccccttatgcagcacagatggcagcggaaactgcaaccaaggctgctttaatacatggattaaaaacagtagacgttatggtaaaaggaccaggttccggccgtgaggcagcgatccgtgcccttcaggcatgtggtcttgaagtaaccagcatccgtgacgtaacaccagttccacataacggatgtcgtccaccaaaacgtagaagagtctaattaggaggtagcttgaaatggcagtaaatcgtgtgcctgttctgaaaagatgcagatccttaggtctggatccaatatatttaggaattgataaaaagtccacaagacagttaaaacgtgcaaaccgtaaaatgtctgaatacggaatgcagctgagagaaaaacagaaagcaaaatttatctacggcgtgttggaaaaacctttccgtaactactacaaaaaggcagacagaatgaaaggccagacaggtgaaaacctgatggttatgctggaaactcgtctggacaatgtggtattccgtatgggaatggccagaaccagaagagaagcaagacagatcgttgaccacaagcacgtattagtaaacggcaaatgtgtaaacattccgtcctatctgtgcaaagccggggatgtaattgaaatcaaagaaaaagcaaaaggttctgatagatacaaaggaattctggaagtgacaggcggccgtctggtaccagaatggttggacgttgatcaggaagcattaagaggaaccatcaaagaactgcctacacgtgcagccatcgatgttcctgtagatgaaatgcttatcgttgagttgtactccaaataataaaaaagattacggcacagcggcatcaattttctcctgtgggaaagttgcatgcctgtgtctcttttatctgatccgtaccctcaaaagaatgattaacccagtaaggagggacctttatagtgtttgattttaataaaccgaaaattgaaatcaccgaaatttcagaagataagaaatttggaagattcgtggtagaacctctggaaagaggatatggtacaaccctcggcaactccttgagaagaattatgctttcttctttaccgggagcagctgtaagtcaggtgaaaatcgacggcgtgcttcatgagttcagttctatcccgggagtgaaggaagatgtcacagaaatcattatgaacctgaaaagtctggctataaagaataacagcagtgacaacgaacctaagaccgcatacattgagtgtgagggaaaaggtgtggtgacagccgctgatattcaggcagaccaggatattgagatcatgaatccggaccaggtaatcgctaccctcaatggcggcaaggactgcagacttgcaatggagctgaccattaccaagggacgcggctatgtaagtgcggacaaggggaaatctgatgacatgcccattggtgtcattgctgttgatgcaatttatacacctgtggaccgtgtgaatatgatcgtagagaacacccgtgtcggccaggtcaccgattatgataagctcacactggatgtctttacaaacggaacactggacccggatgaggcagtcagtctggcagcaaaagtgttaagtgaacatttaagcctgttcattgacctttctgaaaatgcaaaaaccgcagaggttatgatcgagaaggaagacaatgagaaggaaaaggttctggaaatgagtattgatgagctggagctctctgtgcgttcctacaactgtctgaaacgtgcaggtatcaatacagtcgaagaactttgcagcaagacttctgacgatatgatgaaggttcgtaatctgggccgcaaatccttggaagaggtacttgcaaagctgaaagaattaggattgcagttacaaccaacggaagaataagcttccaaatggaatgaaaaaatagagtgggcgctaggcagtatatcagtaagaccgaagatgcatgatatattgttccacagatggaggatttaatacaatggcgaaatatagaaaattaagcagaacttctgatcagagaaaagcattactgagaaatcaggtaaccaaccttctttacaatggtaagatcgttaccacagaagcaaaagcaaaagaaatccgtaaaattgcggaaggtctgatcgcaatggcagtccgcgagagagataatttcgagactgtaaccgtaaccgccaaggttgccaagaaagatgcggaaggcaagagagtgaaagaagttgtggacggcaagaagaaaaccgtttatgatgaagttcagaaacaggttaccaaagatgctccttccagactgcacgcacgtcgtcagatgctgaaggtattctatcctgttaccgaagtacctgcaaagggtgccggcaaaaagaaaaacaccaaacaggtggatatggttaagaaaatgtttgaagagatcgctcccaaatatgcaaaccgcaacggtggatatacccgtatcgtaaagattggaccacgtaaaggcgatgcagcaatggaagtattgatcgaattagtataatttcagttgagactgcccaagagccgcaaggcagcgggcatagttccgggattggagagattctttccgggagagcagtgaatacgaatgaaggcatgggattttttcctgtgcctttttttgttataaaacaaagcgggcttgctccccttgtattgtttttggtattctgctttccaggtggttgaaaataagaacaaaatgctctataatacacatatggacttccgttttcggaaagggaggcggtttgtttaaaaagtctttacaggagttgaacctgagtaatttttttctctttgctgcagtgatggaagagaaagaactgtgcaaagaaatttatattcagaagctgcataaaagagtgaaggagataaagaaacgagatgatctggaggtgaggtatatgtatttatatgaattaatggaggaggagagaaaagaaggtcttcaggaaggtctcacagaaggccgcagagaattgagcgccttggtggccgtgcttttgaaagacggagattatgtatccctgcagcgtatgaccgaggaccctctatatcaggaggagctgcttcgaaaatatgatctgaagtaacaagagtcattaaccggtcacggtctgtgaccggttctaaaaaaaatatccctgccatcccaggcctattcctggctgggacagcggctgacgggtgttttacatatctaaagctgcatctatagttatccaaaataaatccaacaaagaaagaaaacggaagttcagcaaaaaaatatggaagttcaataaaaggtaaggacatggctgtcctgtacaaaatgacacagtgggaatgaaaacaaaattttactagtaattttttaaaatggcttctaggggttccaactgtggtctggtataataaaaaagacaaagtttgtataactggtataagccacacgaaatgccgttgtgttttatggggaagaaattttagtgtgcaggtgggaggaatgtggcctggcccctgaggacatggaggcagatgaaaaccagtgcggacaggaggagccatgaaaagaaaatggaatatgcgtttaaaaatattgatcctgtgtttgggctgcactttggccggactgcttctgcagacctggctttttcaaaattcctcttcccagctgatatacaatcaagccaaggatgaaagctaccgctccctgcagaatatgcaggatgatgtgtacacctttatcaagtatgtggaaagtaagctgattgatgtgtataatgagcgggattttatgacagatttaaggcgggatgtggatattgagacccttcgctccaaatattaccggacagcctacaatctggccacggaaaactttgagacttcagacagtgtagtcgccctgtatctgtatgatgaccaggaccggaatatctgtacctaccgaagggcagtcactcccaagcataattatcccctggatatctaccaggatcctgatcagaacaacagcgcaaaggtgagggaatatttccagtctgacgagaccatgatgcttatttccagttactacaatccctatagggaaaaggatatggttaggtttgtgctgaagctttataattacctcaatgtaaattccaaaatcggttatgtggtctgcgatattgacagcaaggccttggataagattgtggagaaataccgtatagacgaaaatatggtgatctggatccagccggtgtcagaccgtcctgttctgaaggtgggagccctttccaaagaggatgaagaagcctttcggcagatttcccaggaggtgtcagaaggagaaaaaagtccaaagacagctggtgaggggaaaagtgaattcttctgtgtccagcagaaaaaatataatctgagtgcctataccctcatgccctatgagcttttgaacaagaaccagaaggtactgacccaaaacctgatcctcattacagtgatcatgctgggggttgtgagcctgtccttttattttgtcagccggagtctcagccgtcctttggaggagatgaccaccactgtccagcggatccaggcaggggagacccagcttcgcatgaccaatctgaaaaacgatgaggtgggccagctgggcagcagctttaacgacatgctggaccagattcaggggctcatagccaaggaatatgaaaacaagctgctgctgaacaaagcagaataccatgccctacaggcccagatcaaccctcattttctgtataataccctggatactatgagcagcatcgcggacattcaagactgcggccaggtgagcgccctgtgccagtctctggcagggatcttccggtacagcctgaacatgaaagagcccttttccacagtggccaaggagatcatgcatttgaagaattatatttatgtgatgaatgtgcggatgcagaaccaggttacctattccttccaggtggaggagcaggtgcttcaggataccctgcccaggatctccatccagcccttggtggagaatgctttgaatcacggactgcgcaacagtaagggagagaaaaaggtgtttgtgcaggccagggcggtacaggataacctggagattatggtggaggacaatggagtgggcatgtctaaggcgcgcataacccagattctggaggacagcccccctgtccaggaggaaaaaagcacctccattggtattaggaatatccacaagcgcatgaagctgctctatggggaatcctacggggtagttattgaaagtgaagaaaaccaggggacgaaagtctttttgaaaattcccagacggagttgggaggagatgggattatggaactgaaaaaatacaaggtgctcattgctgacgatgaatattggacccgggagaagctcaggcggatcatccagtgggaaaaatattccctggaatttctggagcctgctgttgacggggaggatgttctggaaaaaatcagagaaaatcagccagatattctgatcacggacattaacatgccctatctcaacggagtggcgctcctccagaagatccagcaggagtatccagagatcattacctttgtgatcagcgggtacgatgactttgaatatgtaaagaattcttttatggcaggctctatcaactatctggtaaagcctgtgggcaagattgacctggtaaatgcccttaccaaggccctggagatcatcggggagaggcaggaccaaagagaggagcagcacaagcagcagatggagattcagaaggctgcctccttcatccaggacagggaatttacccatcttctggacctgaagacagcgcccttttcccagaatgtgaccatgaacaaccatatggaatttgtgggagccagccttctgcttattaaaatccacaatcttcaggagctggcacagatgtacgaacacgatatgaatcttttgtcctacaccatcaagaaaaggctgaaggaaatcgcgggagaaagaaaagtgctgatttttaacaatacgcacaggtccaatgagtttctcattgtgtcagaaatgggaaaggagacactggaacacactgccttgaagatcataaaggatctggaagccgccacgccctctccggtgactcttgtggagagcgctcattcctattccatggagaccattcatgaggcttacgttcaggatattgccagaatgatgcttcgtccctttggaaacggaaatatttttctccgtgcatcagaaggggatggagaacaaaggattgtcaacagaattcaggataagcagctgaaggagatccagtcttgtcttaagagaaacaaccttgcagggctgaagaaggaattgtttcaggtgatcgggctgggatcctgtcaggaacagggctggacttatctggaggtgcgccagaccatccagcgttttctccattacctgaccgagtattattctgaccgcctggatgccgggactatgctggatgtgcagagcatgatggatgtggcggacaaggcggcggagcttttggatgagagctatttgtgtgaggtgatgaatgagatcatggagctttttcctgtggcggtgcccttggaggctccggattccatccgcaccggcatccgccaggcagtggaatatgtgaaagagcattactatgaagatctgactttatcctcactggcagagcagttccatgtggagagctcttatttttccagaatgttccgcaaggagaccggggagaatctgatgctgtttatctgcagaaagcgtattgaaaaggcagtggaatatatgaaggagaaaaaccggagtctcacagagatcgcatttatggtggggtatgatgactatacttattttaacaaggtattccgcaagattatgggcatgagtccaagagagtaccggaatgccatggaaggggcacaacatcttgagtaagggcagaattctaagtagaggcagaattctaagtagaggcagaattctaagtggaggcagaattctaagtggagccagtattctgggtagaggcagcattttgaacaggagctgttttttcggcaagtatagagtgtatagattcctggccctggctgtggcggcaggcttgctggccgccggatgcggattccccaaagaggagcaggagccatcccgggggcaaacagttattttaagcattctggcaggtcagtccaccccggatgcaggcattgaggacatgatctctgaggcagtggccgagaagtaccctcaggtggagctggagtgggagtgtgtggactggggggagaactttgacgacagtatgcgggcgagactgtcctcaggagatatcccggatataatcattggaaaatcccaggacgtgcctgcctatgcccagtcagggatcctggcagagatccgggcagagggcatggagcaggtaaaggaggaagccctcaagacggtgaaggtaaatgggaaaatttatgggattccctataatgcctggtatcagggcgtgatctacaataaagagatcttcagaaagtatggcctgaaggtgcccaaaaccaaagaggagctgaaggaagtggtggaaaccctggaggcagggggagaaactgcctttgccggtcactttcaggaggactggaagaccggaaatctctttatgcagatgctgcttaatgagatcttccaggacaatccccggtggggggaggagtttcgtgagggaaaggtgagcttttcccaggatgacaggatcaagggctgtctgatggatgtgaaatatatttatgatcattcttttttaagtgccagccttatggaacaggcggaaagtgaccgcctttttgaagagggaaaggccgctatgtatcccggcgggtgctggtccctgcagtttgtcaatcagtcgggaaaggatgtggactatgggatttttccctatcccaatgaagatggggacagccgcctgatccgggagaccaatatcacctttatgaaaagcgcctttaccagggaggaggagctggtggacgggattttggagcttcttatggaggataccaggcttatggaagaggttttagagtttaccaaaagcttttctgtgagaaaggatgtacaggccggggggcagatctgtatcagcgaggatattcagttctatgaacaggagggttatgtgctggaggcagcggtgggaaattcccagcttgtgtggcggttccagaatacggtggctggggagatcctggagtggctgaaaggaaagcagagccttcagcaggttctggcctttggagatgaaagcagagaagagagcgccgggggagaattttaacaaaaatgcactactccttttttcaattgtgtcctacctgtgggagccgttttttaactataatggacccatgaagcaaggaaccgtataagaattaaggaggaatgattaaaaatgaaaagaaaagcaatgagtgtattattggcagcatccatgtgtgcgggacttaccgcaggaaccgctctggcagtaaatgccgctgacgaggacgtgacccttactattttggcaggacagtccaccacagacgcaggaattgaggatatgatcgatgaggctatggctgagaaatatccaaatattacgctggagtgggaatgtgtggactggggcaatgacttccagccgaagatgcagcagtatcttcagtccggtcttcccgatattatgatcggcaaggcacaggatgtggccacctatgcaccccagggagttctgggagagattgatgccacttatctggacagaggcctggacgctgcacgtgagaacgtaacggtggacggcaaggtatatggtatggtttacaatgcactgtatcagggcgtttattacaacaaggccatgtttgaggagaatggctgggagattcccaaaacccaggaagaccttcaggccattattgaagactgcaaagccaaggacatcattccctttgccagccatatggtagatacctggtccattggaaacgtgaccatgcagtttgccatgaacgatgtgttcaacaaggttccggactggggcgacaagttccgtgccggtgaagtgagctttgcagacagtgaagagatgcagactgcctataactataacaagctgatctttgacaatacctttgaggagaccttctccacggagcagacagactgtgatgccaaaatggttctgggcgaagcagcaatgaaggtttccggctcctggtccatccagaatttcctggatattgatgaaagctttgatttcggaatcttccccttccccaaccagaccggagattccaagctgatcttcgagccgaacattacagttatgacaagtgccaagacagagcatcaggatgctgtaaatgcatttttagacgtacttaccggagacaaggaactggcagtggagattttggactataccaagactgcctccatgttaaaggatgtgacacctacctttgacaatccaagccaggaagacattgacaaatatgccgctgaagatatgatcgtggatgtgactctgggaaataaccagcttgtatggggcggtttccaggaagaaaatgcaaaggatattgcagcatggcttcagggacaggagacctttgaggaatgtttaaaggcttctgacggcagagtggatgccagcagcgcaaactaagcagacaaagaggaaaagtaaagaaggagagagaaatctctccttctcttttgtaaaggagcggtattatgaaaaagtataaagcgtccggaatggaaaaacggatgttccggcaatatttggccttggtcctgccggggatgatcatctttaccatcggtctgatcgtaccactgtttttgtccttccggtattcccttacaagctgggacggcatgacaccggagaagccctttgtagggctgtccaattatgtaaagctgtttcaggacagagaatttcgggatgcctggtggtttaccattaaattcaccattggaaataccattatccagaatgtgctggccctgctttttgcagttgccctggacagcgggatccgggcccagaagctttaccgcacagccttttttgtgccctgtctcatcagcgctgttgtggttggttttatctggctgaaaatgttttccaacgtactcccggccatcaatgactggctgggaaccaactttaatttcctgctgtttggcagcggggatacggttctgggaggccttctcattgccaacaactggcagtgggtgggatactggatgctgatctatctggcaggccttcagtctgtaccctctgagctttatgaggcggccaaggtggacggagccaatgctgtgaagcggtttttcaatgtgaccatccctatgctggccccggccattaccatctgtgtggtgggaataaccactggttccttgaaggtgtacgatctgctggtggcatccaccaagggaggtccgggaagggcttccacctcagtgatctaccagacctatgccacagccattaacggaaggcagtacggatatggctcggccatgacggtgacactggtgctggccctgcttctggtggcagtgatccaggtgaagggactgagaaagaaggaggtgcaggcataatggcggaaagaaaaaagaagaaaaaagaagaagcagcagcccagccttatacaaagggaaccctggtcattcagatcctcatgacgatctgtgcagtgatctatatggcgcctattttgatcatcatcaattattcctttaagaccaaaaaggagttgtatttaaagagccctctggctctgccggaatctttgcagctggacaattatgtgaaggcctttgacaagctgaatatgaaggctacctttgtgaacactctgttctatacagcggtgagcgtggtgatcctggctgttttgtgcggcacaaccgcctgggccattgccagatgcaggaggaaatttttcaaatttgcttatatttattttattgtgggaattctgatcccctatcaggcgttgttcctccccatttatacaatcggatacaaaatgcatctgaccaataccagatatggaattattttaatgtatgtggcaacggggatatcctttggggtatttctcatgaccagttttatgagtaccgtgcccctggagctggaggagtcagccaggattgacggctgctcggtgttccagacctatttccggatcgtgctgcctcttttgaagccagccatggccaccttgatcattatgcagtccttccagatctggaatgattatctgctggccagtctgtatgtgagcaaaaagcagctgaaaacccttaccgtggccatccagtcgctgttctccgcccagaccagcgactataccacagccatggcggccattgtgatctctgtggtgcccattgccgtgctgttcttgtccctgcagaagtattttattaagggaatgaccgtgggggctgttaagggttgagaaaggagagaaaaatgaaagagctgttaaaagaatatacactgggcgacatggtcgtccggtatgaaatcaatgagcagaagcaggtgggcctggttctgtatccagcggaccttcctgttgcggtggaggcggagaaaaaagcagctttggattccctggtgcaggtaaaacttgcaggggatgagtataacggagcctatgctcctggcaatacattaagaaatggggagagtgtacggcggctgacttataaggaccagtgctgcaaagaggaaggggacacggtggttattaccacaagtctctgggatggcaggggatatctggcagagcatgtgcttcgttttcacaaagaagagcaggtcctgcgcattcactgtgcatttgtcaaccaatccagggagccggtgacgctggaaatgctggaaagctgctccatttcgggaatttcgccctatctgcctggtgacggccacgaagagattctggtgcacaggcttcagagccggtggagccaggagggccgccttctcacccagagtatggaggacctccagctggatacctcctggaccatggaggctgtgcggtgtgagcgcttcggccaggcgggctcccttcctgtgaaccattattttccctttctggccatggaggataagaaaaatcacgtgttctggggaatgcagcttgcccatggagcctcctggcagatggagatttaccgggtggatgaaaatattgcagtgagcgcaggacttgcagaccgggaatttggtcattggatgaagaccatactgcctggggagtcttttgccacaccggaggccattgtgacaacagccagagaggagtcccttgatgttttcaccagacgtctcacagatgcaggaaaaagggccgtacaggcagggcctgcctgtgagcaggagctgcctattgttttcaatgagtactgtaccacctggggctgtccctcccatgaaaatattctggaaatcctggataagatcaagggaaaggggttcacctattttgtcattgactgcggctggtataaggaggacaaagtgccctgggatatcagcatgggagactatgaggtatccaagaccttgtttccccagggccttcataagaccgtggaggccatcaaagaggctggtttgaagccggggatctggtttgagatcgaaaatgtgggaaaggcctcaaaggcctataaccaggaagaacaccttctccatctggacgggaaagtactgaccacctcaagacggcgtttctgggatatgaatgatccctgggtacaggaatatctggaggagcgggtgatccaaacgctgaaaaaatatggctttgaatacatgaagatcgactacaatgacaccatcggcatgggctgtgacggctgtgaatccattggagaagggctgcggagaaacctgcaggccacctgggatttcctggacaaggtaaaaagagagatccctgggatcgtgctggaaaactgtgcttctgggggacatcgcctggagccgggctttatggggatcaccagcatggcctccttctcagatgcccatgagtgtgaggaaatccccattattgcggcaaatctccaccgggccattctgcccagacagagtcagatttgggcggttataagagacacagattctctgaagcgcatcgtgtattccatggcaaataccttcctgggaagaatgtgtgtgtccggggatgtgtggaggctgaatgaggagcaatgggctgcggttgaccggggaattgccttttataagaagattgcaccggtgatcaaggacggacagacctaccggtttggtcctgaggtgaaaagcatccgctatccaaagggatggcagggaattgtccgcgtgggggacaatgcggaggcctttgtgctggtacataccttccatggagagtatcctcagaccatttcactgcccttacccaaggggtgtccaatgactgtggcagaggtgtacagtgacggtgaaaaatccgttgtgatcagggaggattccgttgagatctccggcctgagagaggcggaggctgtggcggtttacatgaaataaagaatgcagaaccttttaggagagggtgtcttaggacactttctccttttttcttttatacctttccccatttgctggctattgtctggggcatttgttataatagttttatggcccctctatggaaaaggcagcaggggatatctgagagccttatcttcagggcggtgtgggctttgcggctgcttatggcagccatgtgagcgtttattatgtgcaaactatgaaagtatagaatagaaaagaaaggcggcaggcaattatgatcagcaaagaatttcatgcatccaggcgggctatgtacagagagcttttggaggataattccatgggctttgtattttcagggaatgaaaaagaggacagaggggatcagatgtttccatttaccccctatgccaacttctattatctcactggatttacagctcccaaggcagtgtttatggccaccaagatccatggaaaatataacgagatccttttcattgatcatccagatgagatgaaggcccggtggctgggcgtgtgttatacaaaggaaagtgtcagggaggagactggcatccaaaatgtggaatatttagagcgctttgaggaaaaaatccccctgtttggaagaaggaatgagattgcccgtctgtatgtggacattgccaactgggaggagggctttaccaaaaatccggcccaggcttttgcagataaggtgcgctcctgttatccatatctggaaatccataataccttccaggacctggcccttatgcgtcaggtgaagacacaggaggaaatcgctcttcacagaagagcctgtgagatcaccacgcagggctgtaggaatatcctggagcatttaaagccgggaatgcacgagtatgaaatagaggcctattttgattttactttaaaatccaatcatgcccggccagcctttaataccattgctgcatcgggaaaaaatgcctgtgtgatgcattatgtggccaatgaccggaagatgcaggcaggggatctgatcctctttgacctaggagcggaatggggctattatgcctctgatgtgagccggacctttccggtgagcggtgtgtttacctccaggcagaaggagctgtacaatgtggtattaaagggtctggaagcggccatcgcccgcaccaagcccggtcagcctaaaaatgagcttcaggagatcagcaagcaggtgatggcgcaggagctgatgaaactgggaatgatccaaaagccagaggagatcatgaagtattatttccattcctccggccattatattggcctgtacacccacgatgtgggaaatgacgaggcagtgctggagccagatatgatgtttaccctggagccgggcctttattttgaggagctgggaatgggcatccgcattgaggatactattctgatcacaaaggacggatgtgaggtgctcacgaaagggataccaaagacggttgaagagattgaagcttatatgaaaaaatgaagggaaaatctgggaatttctggttgcaaaaccattggcgaaaggttatcataagtaaaacagctgtcttggtatacagacagctgttttagggagtattctgttagatggaaaggggagaagtctgtgaagatttatacattaatggagaatacggcggtttcagaggagtttgaaagccgtcatggactgagcttttacatcgagacgaagagacataagatactgtttgatatgggaccggatgagacttatctggtgaatgccaagaagctgggagtggatataagttctgtggatattgcttttctttcccatggccactatgaccatggaggcggcctgcaggcctttttggagcataattccaatgcacaggtgcatatgcagaggaaagccttcggcgcttattattcccaggatcctgatggtgcggtgcgctacatcggtctgcctttggagctgaaagacaatcccagatttgtgtatcatatgggagattacaggattgatgaggaactacagcttttttccggagttacgggaagagagtgttattcgccggccaatgacagactttttatagagcggaacggcagacgggtgcaggatctctttatgcatgagcagaatctgctcatacaggaggaccgcaaaaccgttttggtggccggatgtgcccacaatggaattgtgaatattttaaagcggggagaggccatgtcccctacccctataactcatgtgatcggcggttttcacctgaaaaatccatatgcccagcaggaaaagcaggaggctttctgcagggagctgtcaggaaaactgaaacagaagaagattgaataccacacctgccactgtaccggaacagaggcatataaattcctgaaaaaggatatgggcaggcagatttcttatttggctgcagggagtgtactggagatataaaacaaaaagtaactatcattttacataaaagggctgctgtctttccccaaggggaaggacagcagcttttttatgttataggaaagttctccgaacttgcctataacataaaaagccctccgggcgggatgcacactgcggcgtacaatgtagatgtcgcgaggcgaccgccgcaggcgcgagtttcgcaagcaaaactcttttcttgtgctggtatggatactaagaaagcagccattggcaggctctgtaggcaataggagaccaaaaggctgggatcagcggatatttttggaaatttgttctgtggcggactgggtctcggctaaaattctgttcagggacactgtgtcccggaaggcctcaatgggtcctgtgatggttaaggcagccactggcacacttccgctctggggcacaatggggcaggcaatacagccaacacccagtgcatattcctcaaagtccgtgccatatcccagagacttaatggtcttcaggtggcggagaaattcttctttttgggtgatggttttgtcagtataaggttttacattttcccatgccaggttcagctgttcctcctgttttccctccgggagaaaggtaaataaaattttcccggcagcgctggctgtgatggggatgggttcccctaaacgtgcgatgacaaccataatcttagcgggaagtatctgattgagggtgagtactgttccttggctgagtacagagagctggcaggccagttcaagggtgtctgacaattgcttcatacaaggaagtgccacggtttccaggtcgcttccgttataggcgatttttgacagatagcttaatttatagcccagattatatttatctgtggcatatggattttcatagagatatccataatgggccaggcagtgaatgatgcggtaagcagaggaaacaggtatggacagagcatttgagacctctgaaatagacagaggatagggatgattggcgaaatactccaggatcagcagagtccgctctgtcgctggtggaaatatagatgatttatcgttcatatcttttttgattatatccttttttattgatattaccatttacaatatttttttgcaaatagaaaagagaaaaatatgagagaatactggatgttaataatctgatttgtgtttattaagcaataaattcacagggaattattgtctgaaattgacaaaaatactttgatttttaactgattattgacataattaccggtagatgataatatatgaaatataacaaccgtatgtgaaatatagttttcaaatatgaaaagaacaaggcgtatttaggtgtaaagtcccagtgaggtattatttgtggaaaatgagaagaaagtatgtgtacctgcagtagaaagagccattgatattttggagtttattgcagagaatccagaaggaaaaacaatagcagaaatatgcgaggcattgaaaattccagtggcatctgcttttcgcacagccaaatatttagcgggaaggggatatttaagggaaaatcatcacctgccctgccgttaccgcctgggatatcaggtgctgaaaatttccaacgcccttttaaatggtgtgtctctttacagcgccgcaaaagagtctatgcccagggtagtgcagatcaccaatcaggcagtacagcttgggatccttcaggggtccatggtgacctatatcgaacagatgcttcccaaaacaccggtaaatattattgcgcctgtccatctgcctattgcattaaacagcagtgcttccggcaaggtgattctggcaaataaaagccgggaggagcagatgcagcttttagacagcatggagtacgaagtgagaacagaaaaaagcatacgcaacaaggaagagatgcttctggaactaaaaacggtgaagctttatggctatgccatggatgacgaggaatatgctctgggcatcggttgtctggcagccccgatctttgattctgagggggagtgtgtgggagcgctggggataacaggggaaattaaaggctaccaccatcaggagactaaaaagctttttttggagtgtctacaggaggaggcagcgagcatctctaagcgtttgggctggcaggcaaagaaggaggagaaagtatgagtggctatacacgattaaaatacgaacacgtgtttgggatttcttgtaaggtttttgaaaattatgggatttcaaaggaagacagcaggacagcggcagagattttgctggccagtgatttaatgggcattgaatcccatggtctccagaggctgaatatgtactgtacaggcatgaaaattggaaggatcaatcccaaggcagttatgaggattgaaaaggaaacccctgtatcagccgtcctggatgcagacgatggctttggccagattgcgggaaaaaaggcgatggagctggctatagagaaagcccagactgtgggcattggaatggttacagtgaaaaattctacccattatggaattgccggctattattccatgatggcggctaagaaggagctgctgggaatttccatgacaaacacagaagcattggtagtccccacctacggaaagactcctgttttagggacaaatcccattgctgtgacaatgcctgcacatccctatcccctgcacattgatatggcaacaagcgttgttcccgcgggaaagatcgaggtatataacaaaaagcagaaaccagtgcctgagggctggatattaaatgcagacggggaggtaacaactactgctcaggagtttattgatatccgcaggaataaaacagacggaggtctgcttcccatcggcggggcaggagaactgcacagcggacataagggatatgccctatctatgctggtagagcttatgacggcgattctggcaggcggtaataccagctattttgtgaggagggtgcccaatgtggagaaatgctgccatgtatttttggcaattgattatggaatatttggagaaaaaaagtccatagaggacagtctgagttcttatctagagctgatcagaaatacaaacaaggccaaaggccacgaccgcatttatacccatggagaaaaggaactggaaaaatatgaatggatccgggagcacggagttctggtaaatgacaaaacttatgatgaactaaagaacatcgcccatgggatcggattgacacaggaggaatgttttgtggagatgcccgcagaataaggggggaaagcctttgacaggaagtattatggaggaactgctggccttggaaaaaattccggattttgccaaaattgcctgtacgtttccttccggtggggtgaaggatatacaaggggcagtaagaaactgcatgaaacatccggaattgagacaaaaactacttcccgggaaaaagattgcaattacagcagggagcagaaggattgctcatataaaagagattctaaaagcagttgtccaagaggtgaaggcagccggggctgtgccctacatcgtggcagctatgggcagccatgggggagccactccccaggggcagagacgtattttggaggagtatggaattacccgggaagagataggagccccggtgatcacagatatgtctgtagattatgtgggagagacaccacaagggcttcccatttatctggattccttcgctatttcttgtgacgggatccttgtagtgaacagaattaagcctcatacagatttccatggccaggtggaaagcgggctttgtaaaatgatcgccattggtttgggaaagcagaagggtgccgccctgtgtcataaaaagggattttcgtctatggcggagaatatttttgaaatagcccacacggctgtggaaaagacgccgattttgtttgggctgggaatattggaggatgccggacacgaaatctatgcagtggcaggccttccaggcagagaaatattctcagaggagcctcgattgcttcaattagccaggacacttatgccccgcataccctttgacaaccttgacctactgatcgttcaggaaatcggaaaaaatatcagcggggcggggatggatcccaatattacgggaagatctccaagacttggtatttcccggcctcatgcagagagaattgtggttctggatatttcagaggaatcccagggaggcggcactggtatgggaaatgcagatgcagttaccagaagggcatttgaaaaattcagctttgaaattacatatcccaatgggctcacatcctgtgattcagaaagtattaaaataccgccggtgatggagggagaccggcaggcagttcagtttgccctgcgcattgcaatgagatcccaggccgggcggcctaagaaaattgtgtggataaaaaacacttcctatctgcaggagatgtggatatctcagggattgctcgcggaagctgcccagatagaaggagtcaggattaaaacgcctctatgtactccgttttttgatgaaaatgggaattttacaaaaatgatggcaagggatggcaaggaatatgaattatggtgaaaggaatctaggacaggaggatgaaaagctatgcagagaattttaaatgacccggatgatatcgtggacgagatgctcaaaggattcttgcaggtccatggggatgtggtgcaggccacagagaacaagagagtcattcaggcaaagcacctggaaaaaggccgggtgggcattgtaacaggaggaggttcgggccataagcctgcatttgtgggatactgcggggaaaatatgtgtgatgccgtggcagtgggagaaatctgttcttctcctaccgcagccgcttttcttgatgcctttcgtgcagctgacagaggaaaaggggtggcctgtctctatggaaattattccggagacaacatgaacgtgaagatggctgtaaagatggccaggaaaataggcatagaagtaaaaaccgtggtggcaaatgacgatgtggccagtgctcccaaggaaagcagggacaggcgcagaggagtggctggagagattttcatgtggaaggcggcaggagccatggcagccaagggggcagatctggaccaggtcatccgggtggggcaaaaagccattgaccatacgagaagtgtggggatcggtcttactccctgtacgcttcctgctgtgggacatcccaattttcagatccaggagggaaccatggaggtagggatcggtcatcacggtgagccgggaattcaggtgtgccctctggaaagtgcagaaggtatggcaaaaaggatgacggacattgttcttccggactatccctttgaaacaggagatgaggctgtcgtcttagtttccggtctgggagccaccccggttatagagctctatgttctctaccaggagatccgtacaatattaggccagaagggaatcgccgtgcacagatcctatgtgggaaattattttacttcgctggatatgatgggagctacctttacgatcatgaaactggatgaggagctgaaggagctgatggacatgcctgcgtataccgtaggttttaaacagaaataaggcgggtaatggaaaatggataagataaaaagtgaatacggcagggaaattcttcttgccatggtgcaggccatccaggagaacaaaggttatttgggggatgtggacgggctcatcggagacggtgaccatggcatgaatatgaacaagggattttctttgtttgaaaaacggctgggggacaggcaggtctccttttcggaggggctgcaggagctgggagaggtgctgatgggagagatcggaggatccatgggaccgatttatggaaccatatttatggaaatggcagaggccggagaggatttgaaggagctcaccctgcctgcctttacaaaaatgttggatcaaggtctggagggcctgaaagcattggtggatgccagggtgggggacaagactttggtagatactttggagccggcggtaaaggctttgaagcaggcctgtgaggaaaagaaaagctttcctgctgctctggaggttatgaaacaatctgctgaggcagggcgggattccacgaaaggactggtggccaggtatggaagggcgagcagactgggagagcgctccagaggcgtcatagatgcaggggcagcttcctgctgcattttactttgcgccatggctgacggtatccaacaggcagggaggcgtgaaaatggataaaattgcaattggctgtgatgaggcggcctatgaattaaagattgtgataaaggaacatctaaaagccacatatccgcacatggaagtggtggattttggagcagataaaggagaaaaagtgctgtacccggatattgcctatgaggtggctgatgccgtggccaagggagaatttccaagagctattttattgtgcggaacaggaatcgggatgtccatctgtgcaaataaggtgcctggggtaagggctgctgtatgtcatgatcccttttctgcggaacgttccagaaaaagcaatgatgcgcagattatgtgcatgggtgagcgtgtgatcggacctgagctggcaaaatatctggtggacatctggctgggctgtgaattttcagggggaagctctggccctaaggtagagagaatccgggagctggaggcagcgcatatgggctggaataataagattgaacaggaggagcaggtatgaggaaaccattgctggggctgatcggattttcagacggagatccccaggtccatgaacagttaaaggatattgtccaggaacagctggatgtgatccgggaggagcttgaaaaggaaggcagtgtggaggttttgtccgccgattgtattgtaaattccgtagaatctgccaaatcagaggcggagaagctgaaggccaggggggtggacggcacaattttttcctacggagtttttgcctttcccagtttttctgccatcgccgcaaaaaatggaaaaggaccttatcttttatgcgccaacctgaaccctgactggccgggaatggtggcaatgctggcagcgggcggcgccctccaccatctgggtattgaacatttccgggccgccggggatttccgggacagggaagttctggaaaaggtaatgaaatttgcaaggtgtgcctgcacggtgagcagcctcaacggacagaaatacggtctgatcggaggaagaagcctgggaatgtacagcgccacggtgagtatgcaggactggcaggaaaaattcggtattgatgtggaccatatggaccagtctgaaattctgcgtttagcagaagaagtccctcaagagcaggtagaaaaaggatttcagtggctgacgaagtataccggagggatttattatgatgacaagaaactgactcctgagaagctgaagcagcagattcgtcactatgaggctttgaagcggatacagaaggaaaatgcctatgattttatgggggtaaagtgccattatgaaatgagccgtcattactgtacagaatgtattgccgccgcttttatgaatgacccttatgactgggatggagagaaggaaccagtggtgtatgcctgtgaggcggattcggatgcggctctgactatgcagattttaaagctgcttacccatgaacccgtgatttttatggatgtgcgacactatgatgcagactatgatgttatggtattctgcaactgtggctctgagtccacttattatgcaggaagaagccgggatccggcggaaaatctgaagcatgtgaagctgtatccctgcctggatatttatgcaggcggcggctgtcatgtaaactgtatgacaaaaccggggaaggctaccattgcccgtctgaacaggaccaggggaaagtatcggatgaccatcatccctgcggaattcgtatctctgccagaggaaaaaatggaagagaccaccagggaatggccccatgtttttgcaaaactgccctttgaccacacgatctttctggagaaatttgatgccaatcattgccacgctgtatatggagactatgtggaggaactaaagatgatctgtaaaatgctggacatcgacattgaggttctgggatagaaaaaagctgctgctctacacaccgtagaccagcagctttttactatacaatttataattctgtcttagaaagagcggcctcgtcagctacgatgatacagttgggatggagctgaaggatgctggccggaacctggggggtgatggggccatggatcatctgggccaggatttctgctttgtcttcgccgctcaccacaaccagcacacattttgctctcatgatggttccgatgcccatggtgtaggcctggcggggaacatctgcctcgctggcgaagaaacgcttgttggcctggatggtggtctcggtcagatctacacagtgagtttcatccgggaagtgatccgcgggctcgttgaagccaatgtgtccgtcatgtcccaggcccaggagctgaaggtctgcaggaccagtctggtgaaggacttcgttgtatgccgcacaggctgcgtcactgtcctggatcgtgccatcggggacattggtgtgctctatgggaatatttactctggagaataaatgcttgttcatgaaatagcggtagctctggtcattgtctttgtccaggcctttgtattcgtccaggttcacagtggttacggcagaaaaatccagatcgccgttttcatacatcttcaccaggttgtcataggtgccgatggggctggagcctgtggcaagtcccagtacacagtctggcttgaggatcactgtggaggcaatgatattggctgctttgcggctgagttcttcgtagttcttggttttgtaaattttcataatggttccctctcctttgattggtatatagttgttgcatgtattatttcctgtcagccagtgccttaatggaggaggcatattctgacggggtcatacctgtgatctttttgaactgtctggaaaaataatggatggaagagtagcccagaaagtccgaaatctgtgtgaaattcatatgattttcccggatgagctgtttggcaaactcaatcttcatttgggaaaagaagtcaatgacgccgcagttgtgctgctcccgaaacattttctgaagctgggagcggccaatgagattttcccggcagatgtcctcaatggagacatactcccggatgtgttcttccagataaaaaataatcttgttgtaagtggctgaattgtatttcaggtttgcaaagctggtgagaggcatgatcagctgaggggcggtgtgccgtcggatcatataaatcagcatctgctggagatagatttttataagctgctggcttccaagaggtgtttccggttttttctccatcttttccaaatagggatcatccagaggggtggaaaagcatttgcgggcctcggccacgatcatggccagaagattccgttcctggtcattgatatccagaattttatgattaaaaaattccatagccggtgaattacattcaaaagccacaaccacaatattgggtgcactttttccattggcattcaggttatggaattcgttgggccgatgaaagataatctgccccctttttaatatatgtatctgatggtcagcgagaacctccacctctcctttgtcaacgcattgaaattcccagaaattatgggcctctccggaaaaatgaaaatcatttcggtattcaaaataatggatggtgacaatccgctcaatctggacatcctcatccaaatgtacactcacataagtcataaatactccttgtcaagcgggaaattttcaatctcctgaacagctttgtataaaacacaggccgtgtgaatttaataacaacctatggctattatagaccatttcaatgaaaaaatccacaattattccaatgattcttagctacggtcctaaaatagcgtaaagtttcacaaaaatcaagtggttcaatgcaaacgtacaaaaaaaatccacaattgtataatatccattttgtcgaatttaggttatacttaagccatgagcaggttgtgtgcttacaaagaaggaggtagcaatatgtcgaaaacaaaaggaagagtaactctcccaagtgagtcaaattttttgaatgagacgaaggaaatgctggggcgctggggcgcggatgctctgcgtgacagtgacggaacgaagctggatgatgatatcaaggcattggatgcgaaaatttatactacctactttgtggccagaggccataatgaatttgccagggagcatatggaagaatgccagcagctgtacctgatgtcccgtcataatacggctgtccaggaaaccttgtccattgcttttatggaaggctattaccaggaacaggtgatccctgactatatacatgacccaaagaaatggtgggaggtcattgaccggaccacaggagaggtggtttccccggatgtgtggagcctggatgagaagcagcatcaggtcatcctgaaacaggcggagcccttccatgagtatacggtttcctttttagtttatgccatctgggatcccacccagatgtacaatcatattacaaataattggggggacaagccccatgagattccctttgacgtgcgtcaggcacagtctggggcttttgccaaagactatttgatccagtggctcaaggaaaatccttccacggatgtggtacggtttaccacctttttctatcattttaccctggtgttcaacagtgatgccaaggagaaatttgtggactggtttggctatggcggaacggtttctgtgaaggctctggaggagttccaggaggaatacggttatgccctgcgcccggaggacattgtggacaatggctattacaattccaccttccgggtacccacccagcactacctggactacatggactttatccagcggtttgtggctaagaaggccagagagctggtggagatcgttcatgaggcaggccgtgaggccatgatgttcttgggagacaactggatcggaaccgaaccctatggaaaatatttcggagagattggtctggatgcagtggtgggcagtgtgggaggaggcgtgagcctgcgtcttatctcagatatccccaatgtaaaatacacagaaggccgtttcctcccctatttcttcccggataccttctatgagggaaatgacccggtgccggaggctatgaaaaactgggtgactgccagacgtgccattatgagaaagccagtggaccggatcggctacggcggttatttaagtctggcctacaaattccccaagtttgtggactatattgagcaggtgacagacgaattccgctacatttacgacaccgttcagggaatgaagccttacaacggtctgaaggtggctgtgctgaattcctggggttccctgcggtcctggcaggcctacatggtggcccatgagctgtggtacaagcagtgctattcttatatgggagttatggaagccttaagcggggcggatgtggatgtgaccttcttaagcttccgggacgtgaaggaaaaagggatccctgaggatgtggatgtgctcatcaatgcagggagcgccatgaccgcattctccggaggtgaagaatgggctgacgaaaagctggtggcagctgtgcgcagatgggtgtacaatggcggcggtttcctgggagtaggagaaccttctgcttatcataagggaggccatttcttccagctgtgtgatgtgctgggagtggacaaggagctgggcttcaccctttctacggacaagtattttaatacagctgtggataagcattttatcagtgaggaccacaccggggagtatgatttcggtgagggcatgaagaatatttatgccacatccaaggacacggagatcattgagtattcccagggagaggttcatgtggctgcccataagtatggaaagggcaatggtgtgtatctggcagggctgccctacagtcatgaaaataccaggcttcttatgcgggccttgtattatgcagcaggaaagcaggagaagtttaagctctggcatgcagacaatgtggactgcgaggttcacgcatatcctcagtcagggaaatatgcggtgttaaacaacaccattgaaattcagaagaccatggtttatgatggagacggcaatgcacaggaatataccctggaaccaggcgggatcatctggatggatattaaaaaatagaaacgaaaaaggataatcaaatatgagggaacggcagcttttgatcaagccggcttcatccaactgcaatctgcggtgcagctactgcttttatgaggatgaggccagctgccgccaggttccttcttatgggatcatgacacaggagatactgggcactttggttgaaaaagccttagctgacacggactcctgtgtttttggttttcagggaggggaacccactatggcgggactggactatttttacagatttacagaggaagtacagcgcagacgaaagccgggacagaaggtatcttacaccattcagaccaatggtgtagggctggatccagagtggatggaatttttcaaaaaacaggggtttctggtaggtgtgtctttggacggcatcagggagcttcatgaccggaaccggacagacgcaaaggggaaagggaccttctccagagtgctgaaaaatgcaaagggcatgcaggagatgggaattcctgtgaacatattgtgtgtgctcacaaagcaaagtgcaagaaagattcgttcagtgtatgagtttttgaaaaaagaagagttcttctatcagcagtacattccttgtctggacccattggaaaaagaaaggggaagtctggcctattctctaaaacccggagattacgggaaggccttaaaggagctgttcgatctgtggtttcaggatcaggtccaggggaccccggtatctgtccggcagatggacaattggctccacgtgcttttgggcggccatcccgaggcctgtgccatgtatggaaaatgctccatgcagaatgtggttgaggcagacgggggcatctatccctgtgatttctatgtgttggatgagtaccgcatgggaaatataagggaagatgagtttgaaaagctccagaagaaagcatgggaagaaaaaggattttttaaagatgccgcccgcagagatgaccggtgcagggaatgcaggtggtatcccttatgcaggggcggctgccgcagagactgtattttttcccaggagggcggcagaaattattactgtgaggcatataagggattctttgcttatgccattgaacggatggaatggctggcagatgcataccagtcccggggaccattaaatgtgggcggcggcttctaagaagccccgcccataagtacatagatgatggtgcccacaatcccagagccgaagataatggggatgggccccactttgaatttccggagaaggaacaggctgacgcagaacaaagcggcctcgaccatccggaaatctgtgatctggaaggtgaagatggaggcattaaataaggccagcatgaacagagaaagtcccgcagaggcgatcatggccacgatggcagggcgcagaccggtgaggattccctgcatggtgcgcagactgcggtatttcatatacaggaaggaaagggccaggacaatgataaaggatgggagaatacagcccagggtacagatgatggcgccgggaagtcctgcgatctgctgtcccacaaaggttgcgctgttcacggcaatggggccgggggtcatctccgcaatggtgatcagatctgcaaactggctcatttccagccagtggtttgtctccacaatctgactttggatcaggggcacagccgcatagcctccgccgaagctgaacagaccaatctggaaaaatgcgaaaaacaagcgaagatagatcattttcctgcctcctttctgtccgtgagttttacatgaagaagaccaatggagccacataccaaaatgatgataatggcgctcaccttaaaaaagcaggtggcggcaaaggccaggaccatcatggcgatccacagcagacttttggttttcagcacgttcttggccaggtcgatgaccacgtcgaagatcactgccgccaccccggcccgcattacctgcagggcgatggcaatgtacgtgttgtctttaaactggttgtaaaacacagagataatggaaatgatcaccaagggaggaattatagctcccagggtgctcaccagggccccccagaattttttcagacggtagcccaccacaatggcgatgttcactcccagagccccgggggaggactgggcgatggcagtcatgtccagcatttcctcctcagccagccagtggagcttttctacgaatttctgcttcatcatgctgatgatcacaaagccgcctccaaaggtgcaggcacttaaggtgagtgtgatagtaaaaagcttcagcagcacctgagggccggtgagcttatgtaatgatgattcctctacagtgtttggcataggcatcctccatttttctatgatttatttgtcttggatatattctgggcaggcccgtccgggaataaggcagttgccgtcggtgaagccttccggcctgtccagcagctcctggatcagggtgccccgcagaaggcgtatgcgttcccggcagctctcctcatcgatccggttgcgaagctcatggggatccttttttagaacaaagtattgttcctccccggtggcggtgtaccagatatatttgtcctcctctgtgacgatccagtgggaggaaaactctccataggcgtgttctccgtgaagccagggacggatgcgctccgttggatctttcaccagaggcagcatggactggccgtccacctcttccgggatgggggcgtccacaaaatccagcaaagtaggcataatgtcccgcagctccaccacagaatgacacaaggtgcccggggtcattccaggaaggagagactggctgccggagatgatcatgggaatccggcagcttccctcatagggcctggatttccggaaaagatggtggtccataagctcctccccatggtctgaggtgaagagaatgagagaattttcatattcctcatattcaaccagagcctggatcagacgtccgatctggtggtccagatgggtgatgcaggcatagtagcccatctgggcctgacggatcagttcagggtcagagggaccgcatttggaatcaaagatccttccattttcctccagatatttttcctcctcccagtctcccacatagggaggggtgagggccttgtctttatataggtcaaagtaccaggcaggggcatcgaagggcggatggggccgcagataggaggccatgaggaaaaagggctttcccgggtccctgcgcctgagaaaatcaatgcttcggtctgtcacccagttggtggggtgatatttttcttcgtagatccaggggcgggccacccagctgttgcattcaaggccggtatccgtcacgtcagcccctgctcccagttctttttgaagccaatagaaatagtcatctgccatcttctggttttcctgataggggaccttgccgtaccgggcgctgtgcagatatccgtcatggagctccacgttgtgaaagcccaggtagtttcggagcggttgtacgtgcattttccctacacactgggtataatagccggctttggccagctgccctgccatggtgtgggcgtattcccaggggatgttgtcctgatagcccaccctccggtgatttttctgatccattcctgtgtgcagagcagccctggcggcaatgcagctgggacaggagctgtaggcatggtcaaagaccacccctctggaagcgagagtatccaggtaaggagtttttacatccgggtgtcctgcatgacccatacaatcgccccggagctgatcggtcataattaagataatattcggtttgttcatggcaagtacctcccaaagaattctcctatcactatactcatttcagaaaaaaaatacaagatatactatcagaagtgcaaaaaatgtagtctattttataaagaaaattagtagaaatcacaaggaatttgtggtaaaacattaagatacagctgcactttgtgggacgatggtgcctggataaggaacaaagaagcaagtactgacagatggagaaggagaaattcgtatgagactacgactggaacagcactgggaagagctgggagagggaaccgcccttttggtggagaaaaggggacatgtccttgtacaggaggaagaggccggcacggaggaagtcctttctattcttccggtacaggaggagcttttggtgctccacgtgaaaaagaaaggcagcagggcagtgatccgctttgggcagaaggtgcagttttttcggggactgggaatgcttctggcccattggaaggagggggaatgggagcataaggagaagactattctggaggaaaacggagccatgttcgactgctccagaaacggtgttctcaggccggagaagatccgggaatatctggagcttatggccatgctgggcatgaaccagatgatgctgtacacagaggatacctatgaggttcccggcttcccctccttcggtgccctgcggggaagatacacaaaagaagagatccggcagtgtgatgcctatgcccggatgctggggattgagctggtaccctgcattcagaccctggcccatcttcacaccgctctgcggtggccggccatggaagggctgagggataatattgatattttactggcaggccgtgaggagacctacgtacttatcgatgccatgctggcttctgtaagctccatgttttccagcaggaaagttcatctgggcatggatgaggccttttatctggggctgggaaattacctgcgccaaaatgggttccgggacagaatacagatcatgagggagcacctggacagagtacttacgatctgccataagtacggcctggagcctatgatctggagcgatatgtatttcagcctggcttcccccactggggaatattacaatgtggaggaggactatgagtggaagcctcaggaccgtccaaagaaagaggtgggactggtctattgggactactatcaccacgacacctccacctatgagtccatgatccgtcttcataaaaggctcacagaccaggtgatcttcgcaggtggcgggtggacctggaacggactgtcccccaactattccaaggcactggacagcacgaagaaggcctttcgggcactggaaaactgcggtgtgaagagggcgttttgcaccctgtggcaggacaatggcgcagagacgcctatggatacgggaattctgcctctggtgtattttgcagagtgtgccgtagggggaccggtggagacgcaagctctcaaacgccgctgggaggagctttttcctgggagcagtctggataccatgctgcttctagatgagctggatatggtccctggagtgaaggagcacaaccaggacggggccaatccatccaaatatctcttttatcaggaccctcttctgggagtgtttgacggtcagatacagggcctggacctgggggaatggtaccaggacctggcccagaagatcggcagccaggccaaaaaggaggaacggttccggggactgtactcctattatgagctattggccagatttttgggaaagaaaagcgagctggggattcagatacgaaaggcctatgtgaaggattgtaaagaggagctggaggaaatctgccagatcacaatcccccagtgtatccgggaggtgcaggcactgaaggacagaagagaaaagctttggttccaggactgtaaggcccagggatatgaggtcctggatatccgcttctcaggagtgagggcacgtctggagagcacccaaaaacggttggaggcctatttagaggggcaggtaaaaaagctggaggagctggaggaggaccggatcttgtggctgccggataaagaaggccagcaccagatccccagctgcaatctgtgggaattcatcgccagccccaataatctgaagggtgtctagaaggtttcttcctgccaggttaaaagaatcgtaggtctgccgcctgccaggtggagagaacagacggatgacagaaccgtgaattaccgggtgtctgtctacaaaggctggtgaaggaacttcgtatatttcctgataaaagcggcagaaaaaagccaatattgtcttaattggctgcaattccggaaaaaaacttttttgtgcaaaaaaggtatggaatcgtgcaaatactttttttgggaaaaagactaaaataatggtatcaaatgggcgaaatgttatggaaaatgcccataaaaggaagaggaggtatctttatatgaacaaaaagaaagttgtaagtgtattgttgtgtacagctatggcaacaggtatgttggctgctgcctctgtaactgctcaggcagaagacggaaaagaactgatctactggtccatgtggaactctacagagaaccaggcaaaggttatccaggaagctgccgatgcctatgaagaagctaccggtatccatgtaaacattgagtggaagggccgtgacattaagaccatgatcggcgccgctctggatgcgggagagaagatcgacctcttcgatgatgattatcagcgtgtagttgttcaggatggaaaatatttggttgacctgacagatatggcagcagcagctgactatgaaagtcacattatgccagtgcttttaagcactgccaaggattggggagaaggaaaacttctcaccatgccataccagccatatacaacaggtgtttggtataacaaaaccctctgggaagaagccggacttaccgatgaagatgttcccaccacatgggacgagcttctggcagcctgcggcaagatcaaagaggacggccagtacaatgcaatgacctgtgactctgatttcgtgaatctgctctatggcttccagcttggaagatacatcggacaggacaagatcgtggagaccattgacaactgtgactgggcaaatgtaccggaggctttgaaagccgctgaggacatccagaaattatttgcagagggatacatggctgagacagctccttctacctatccggacggacaaagtgagatcggatttgatgaatccatcatggttcttcaggcatcctgggtaccaaacgagatcattcagaccactggcagcgaggttgactggggatacttcccatggccggcagttgacggcggtgtagacggaacagaagcttccatggttggcggacagggcttcggaatcgtggcaacctctgaaatgcagcaggaagcatttgatttcgcattatctatctgcacaggcgagatggatctgaagatggctgaatccgttaattctattcccgcagatactgccaacactgaatggccggcagcgatcaagggcgcagaaccatatttcaaagaaatcaccaaaccatatatgtgggcagttggattccagacaaatgctgattacaaagagatccttcaggaaaacctggttaaattagctacagaagaagttgatcctcagggattcatcgatgctcttgcagcagctaagaaataacaggtcagaggggaaatacggtcagtaatgtcatgtaggaccccggtccggcctttatatggcggcatcgtttaaacgctgccgccatattctattatctgaagcaataaaaagacaacatcccccacaagggatgtgtgagggctgccgtatcccagggggaaaacggggcggcggcagatgaaaagaagaggaggagtcagcttgaaaaagaataaaacaatgattgtatgctttacattgccggctgcgatcgtattcctcgtaatgttcttatatccggtgatccgtacttcactcatgagtttctttaccatggaaagtgtaagtactcccatgaaagactggagctttgtgggattgggaaattatacggaactgtttaatacggcaatctttaagactgccatggccaacatgctgaaaatctggtttatcggtggagttggggttgtttttatggcacttttgtttgcagtcatcctcaccaacggggtgcgtgcaaaatccttctggcgtgccatgatctatcttcccaatattatcagtgcagtggcattcgccaacatgtggatctactacgtctttcataaaagattcggtatgctccacaatctctttaacgcccttggcctgaaggaactggccaagattgattatatgaacggcagcatgaaattctggtctctgctcattgcgttcagctttggttccgtgggttatttcatgctgatcttcctgagcggtattgaacggctccctgcagattactttgaggcagccaccattgacggagccaataaattccagcagtttatacatatcacccttcctctgctgaaaggagtgttcaaaacggttcttaccttctggacagtaagcgtggtaggcttcttcgtctggtcccagatgtggtcgcctgtaaactcggaaagtcagacgatcaccccggttgtgtacatgtataacattgtatttggcaatacgggtatggtggaacgtatgcctggcaagggtgccgcggttggtattctcatggccgttgtggtgctgattattttcttcctggttaacaagttattcaaagacgacgatctggaattctaaaggaaggagaatgtgaaatggcaaaaaaagagaaaaaagcccgggagccttttaatccgaaaaaagaggcgaaattaattcccggctatatattagtaggcatttgggtgctgtttatcatcgcagccctcatatggatcgcggcggccagtttttccacgtctccggaaattatgaagggaaatgtgttcaagtttgccactgggcttcacccggagaactatgcggcagcatggaattcaaataatattaaagtgttctttttgaactctgccatatatgcagttgtgggcacggtatgtacgattttgatctcagctccctgtgcctatgtattgtccaggtttaccttccttggcaacaaagttctgaagactagctttattgtggcaatgagtattccccagatcatgatcgtgcttcctctgttcagtctggcaacccaggctcatctcacaggaacgaagatcgttctgatccttctgtatattggcatgcaggtgccctttacaaccaccttcctcatgacgttcttcagcaatctttccagaacttatgaagaggctgcggccattgacggatgtgcgcccatgaagaccttctgggtgattatgctccctctggcccagccgggtattgtgacagtaggtattttcaactttatgaacatctggaatgaatactttatctccctgatctttggtgccaacgagcgaaacatgtctgtaggaccaggactgaagagcgtattgacttccatgcagtacacaggaaactggggcggcctgtttgccgctgttgtaattgtgttcctgcccacctttattatctatatcttcctgtcagagaagatcatttccggtgttaccggcggtggtattaagggctgatagaaaaagaataagcattgcacaaaagcactattggttgaaaaagccggtagtgctttttccttgcataagaaagctgctttgctgcattggaggacaaagcagccaggcctattatgggtgagggaatggggagctgaaggggcttttttggcagcagaggatactgtgcagaatgtgcaaatgtaggagagcaaagagaaaagaaaaagaaaaatctccgcccaaattgttctttgctttcctttaaaataaaaaacggagctgtaattgtacgaaataaccaaaaaaataagaggatttcctttactgttgaaatataatgcaaaagaaacagcaaatagtgcaaatactatgtgtttaaaagtgctaaaatagagctataagacaagtgttttgaggggaaaatacacaaaacacagaaagaattaaggaggtaaatggaagtatgaggaaaaaggttttaagtgctttattgtgtgcaacaatggtaggagcaatggcagctccggcagtttccgtgcaggcagcagatgacaagctggtgtactgggcaatgtgggacgaagcagagcctcagggacaggtaattaaggccgcagtagagaagtttaccgcagacaccgggattgaggtagatgttcagttcaagggacgtaccggacagcgtgagggccttcagccggctttggacgcaggacagcagatcgatgtatttgatgaggatgttgaccgtgtgaacggaacctggggaaaataccttcttgatttggaagatttagtaaaagagaataattttgaagaagagcatgcaagccccattttgttccaaattgcaagggaggttgcaggcggcaccttaaagtccattccctatcagccgtcactgttctgctttgtatataataaagcattgtttgagcaggcagggatcgaagcagttcccaccacctgggatgagttcctggatgtatgtgccaaactgaaagaggcaggaattgttcctctcacctgtgatgatgcgtacattgactgtatgatcgcttatcacctgggacgtctgggcggagaagccaaggtaaaagagatcgttacggacggcaaatgggatgaccccattgttcttcagatggcagaggcttatgagaaactggcagcagaaggttacttctcaccgaatttaagcaccaatgtatggccggcaggacagaacaccgaatttgcagttggcacagctgccatgtatctgaacggaacctggcttcccaacgaagttaaggcagttgcaggcgatgcattccagtggggatattttgcatatccggcagtggaaggcggagttgacggagtagaagccaacaacattgcaaaccaggtattagccatcaacaaagataccgcaatgccggaagaagcatttaagctgatcacctacattaccactggggaatttgaccagcagttcgtagacacggctctgtgtattcctgcagacaaagcaaatgcccagtggcccgtacagctggaagacgccaagagtgtatttgacagtaccacaacacgttatggctgggcagtgagcattgagagcaacaatgatatcacaccagtgatcaaagaaaactttacaaaactctgctccggcagcctgactgcacaggagtttgtagatgcaatggtgaaggcttccaagtaatctgggagggcttttcaatagcagcggtatctgggcaggacagcaaaggctgtgtgtgcagacgcaggtttatacaagggtggcatcgttcatacgctgccgccctttttaaatagaaagggggcatatattactatgaagcatagtaagaaaatggtcgtgggtttcctggccccggcagttttcatgtttgtggtggtattcttatatcccatactccgtaccgtgctgatgagtctgtttaaaattgaaggcgttacggacagcatgaatttatggagctttgtgggcattgacaattatgtaaagctggcgaaaaccagccttttccgtacctctatgtttaatcttggcaggatctggctcctaggagggctcattgtaatgacgctggcactgcttttcgccgtgatccttaccagtgggatccgctttaagaagtttttccgtgccattatctatctgcccaacgttgtgagtgccgtggccctggcaaccatgtggcttcagttcgtataccagaatcagttcggtcttctgaaaactgtgtttaccaagcttcacctcaccaagctggccgccattccctggctggattcggatcataagttctatgctctgctctttgcctactgctttggaatggtgggctaccacatgctgattttcttaagcgggattgaaaggatcagcccggagctttttgaggcagctaccattgacggagccaacaaacctcagcagttccggtatattacctggcctcttctgcgaggagtgatcaagaccaatatcaccatgtggtccgttacctgttctgcattctttgtatggtcgcaattgttctcgtcggttacggcagacacccagacaatcacgcctatggtatatatgtatgcccaggtatttggcgcaggaaatgcggtgacagagcgaaacgcaggcctgggcgcggccgtgggtgtggttctgagtatctgcgttgtcattatcttcaccgtgtgtgataaggcaatacgggacgatgatctggaattttagaaagggggagaaagtgatggcaaaagaaccgaaaatacgtacaaaagtcaattggaaaaaagaagcaaagcttgctcccggatatatcatcctcattttatgggtgttgttcacctttgtgctgttaggctggatcgtgtgtgccagtcttgccacaaccccggagattttccagggaaaagctttgaaatttgaaacaggcttccattttgaaaactatattaaagcgtggaatgcttccaacgtagcaacctttttcaccaactcgctgatttattcgctcatagcctgtgcgtttctggtggttatctgtgcaccggcagcctatgtgctgtccaggtttgactttgtggtaaaccggatcatcaagaccagttttgtatcagctatgggtgttcctgtggttatggtggttcttccgctgttcagcattgtggcatatctgaacctgctgaatcatgagatcaccaaccggatcgttctggtgtttctgtacataggcatcaatgtgccctacaccaccattttccttctcacgttctttgcgaacctgtcaagaacctatgaggaggcggcggccattgacggctgcagtcccactaagaccttctggaagattatgtttcctatggcgcagtccggcctcattacagtgaccattttcaactttatcaatgtgtggaatgaatacttcctgtcattgatctttggaaattccgatgcggtgcgtcctgtggctccgggactttacaatatgatcaatgccatgaaatacacgggagactgggccggtatgtttgccgcggtggtgattgtattcctgcccacatttatcctttatatattcctgtctgagaaaattatcggcggcgttacaggaggaattaagggctgatcggataggggggataccttgcgtgtctctccttttttctataaaaatgttccgggcacaggtagacaaaaattgtgcaaaaaaacaatacaatcaggcctagtcatggaagaaaatatcttctataatgaatagcagagcacagagaaaaagcgtctggagaaggaggactttttagatgaaaaaaccagttttagtagtgatggcagcaggtatgggaagccgttatggcggactgaagcagatcgatcccattgacggacagggacatattattatggatttttctattttcgatgcagtaagagcaggatttgaaaaagtgatctttattataaagcatgagaacgaagcagatttcagggaggccatcggcgaccgtctcagccgggagattgaagttgagtatgtatttcaggagcttaccaacctgcctcagggcttccaggtgccagagggaagagtgaagccctggggtacgggacatgcgatcctcagctgtctggacaaggtggacggcccctttgcagtgatcaatgcagatgactattacggaggccatgcgtttcagatggcttacgatttcctttcagctaaccaggacaaagagaaataccattatatgatggttggctataagctggaaaataccctaacggacaatggccatgtggccagaggtgtgtgtgtgatagatgacagcggatatctggacaagatcaatgagcgcactcatattgagaagagagagggaggcgccgcatatacagaggatgaggggaaaacctgggtggacatcccggcaggaagtacggtttctatgaatatgtggggattctccgccagcattttacaggaattaaagcagcgttttgccaaattcctggatgaaaatctagaaaaaaatccgctgaaatgtgagtatttccttccctttgttgtggatgagctgctggcagagggcaaggctgatgtgaaggtattaaagtctatggacaagtggtacggagtgacctacaaggaggataagccggtagtgatggcagccattcagaagctgaaagaggacgggctgtatcctgaaaaactatgggaggacgcataagcatgacaataaaagaagagattcttcaggaggttatcagccagtttccctttccgggaacccagacagagtgtgttccttttggaagcgggcacattaatgatactttccgcgtagctttttgtgatggaaccaggaccaggcgttttattctccagagaatgaacaagaagatcttcacaaaaccagtggagcttatggagaacgtgctgggggtcaccacctggctgaagagaaagatacaggaaaacgggggagacccggagcgggagactctgaatattgtttccacagtggagggaaagccttattacatagattctcaggaagaatattggagagtatatctgtttattgaaaatgctaccagctatgaccaggtggaaaaacccgacgatttttatcaaagtgcagtggcctttggacatttccagggactgctggcagattatcctgcccagacactccatgagaccattgtaaatttccacaataccgtggaccgttttcagaaattttctcaggcgctggaagcagatgtccggaaccgggcaaaggatgtccagaaggagattcaatttgtcctggagcgggaagccctggcccataagctgtgtgacctgcaggaaaagggagagcttcctctgcgggttacccacaatgacaccaagctgaataacattatgatcgacaatgctacaggcaaggcgatctgtgtgatcgacctggataccgtgatgcccggtcttgccgtgaatgacttcggtgattccatccgttttggcgccagcacaggggcggaggacgagcaggatctggaccaggtgtggtgtgacatggagctgtttgagctgtatgccaagggctttattgagggctgcaacaaaagccttacggacatggagctggatatgcttccctacggagccatcctcatgacctttgagtgcggtatccgtttcctcacagattatctggagggagatcactattttaagatacacagagaagggcataatctggaccggtgcagaacccagtttaagctggtgaaggacatggaggagaagctgccggtaatgaaagctattgtgcaaaagtacagatagtggtagaataccctttgatgaggatgatagacagaagagcaatattgtaaaaacaggaggtaaggaactatggcaatcttagtaacaggaggcgccggctatatcggcagccacacagtggtagaactgcagaattcgggctatgatgtggttgttttggacaacctttccaactccagtgagagatcacttgagagagtggagaagctcaccgggaaaccggtaaaattctacaaagctgatattctggacagagcagcattaaatgatatttttgacaaggaaaacattgactcctgtattcatttcgcaggcctgaaggctgttggagaatcagtggcaaaaccatgggaatactatgaaaacaatattgcaggcacccttacactggtggatgtgatgcggcagcatggagttaagaatataatcttctcctcctccgcaactgtttacggtgatccggctatcattccaatcacggaagagtgccctaagggccagtgcaccaatccttatggctggacaaaatccatgctggagcagattctcacggatatccagaaagcggatcctcagtggaatgtcgttctgcttcggtacttcaatcccattggcgcccataagagcggcaccatcggggaaaatcccaacgggatccccaacaacctcatgccctatgtgacccaggtggcagtggggaaattaaaagagctgggtgtgttcggaaatgattatgatacccctgacggcactggggtgagagattatatccatgttgtggatctggctaaaggccatgtgaaggcactgaaaaagcttgaggataactcaggactgagcatttacaacctgggaacaggaaaaggctacagtgtgctggacattgtgaagaactttgaggaagccacaggagtgaagattccatacgtgatcaaagaccgccgtccgggagacattgccacctgctattccaatgccgctaaggcagagaaagagctgggctggaaggcagaaaacggtattaaggaaatgtgtgaggattcctggagatggcagtccaacaatcccaatggatacgaagactaaaccgcgtttatctgtgaaatagaaaaattgtcaaaaggaaaaagaccaggaggtacggctgtctgccggatttcctggtctttctgtctctgaagaaaaatgcattttaaaagagcatattattggtaacgcttctctttttcatatttgggctctgaggtgagctcgatcccaagcttcataaattcctgaatatccacagaggacagcatcacagagctgtgtgcctggcagcccttcaaactgcgcagctgctccagggccagccgggcttcttcgttgctggcagcgctcacagagagagcgatcaaggtttcatctgagtgaagacggggatttttgcttcccagataccggattttcaattcctgaatggggcggatggcctcaggggaaatcacatgatgctcatggtcgatccctgccagctcctttaacgcatttagaagaagggcggaggaagcccccaaaaggtctgaggttttaccaaggaccatattgccgttgggcagctccagggctgcggcgggagcaccggtctcttcttcttttttcaaagcggcgggaaccactgtgcggtcctccacagtggcgtgagtctgctggagaagaagctggatcttgtaggcctcctcttccgtgccggaaccggaagccagggcattcatagctttgtaataacggcggatgatctcctgacgggaggcttcccggcagacttcatcatccacgatgcattttcccaccatatttacacccatgtctgtgggagatttgtaggggcattctccagtgatcttttcaaacattgcctgaagtacagggaagatttccacgtcccggttataatttaccgttgtctccccgtaggcctccagatggaaggggtcgatcatatttacatcattcaggtcagcagtggcagcctcataggccaggttgaccggatgcttcagaggaatattccagatggggaaggtctcgaacttggcatatccggcctggattccccgcttatactcatgatagagctgggacagacaggttgccattttcccgcttccgggtcctggagcggtgacaactaccagcgggcgggtagttttgatatattcattttttccataaccctcatcgctgacaataaggctggtattgctgggatagccgggaatggggtagtgcaggtatacggggatccccattttttccagacgtttcttaaacagatccgcgctttgttccccagaatactgggtgatgcacacactgcccacatacaggcctttttctgtaaaagcatccatcaggcgcaggacatcttcatcgtaggtgatgcccagatcgccccggattttatttttatcaatgtcgcctgcactgatcacgatcacgatctcggcctgatcagagagctgcatgagcatacgcagcttgctgtccggttcaaagccgggaagtactctggaagcgtgaaagtcgtcaaaaagcttaccgccaaattcaagataaagtttattgccgaactgatttatacgttcccggatatattgggactgtaagagaagatatttcgcgttgtcaaatcctggtttcattggtttggcttcctttcccaaagtttatgctgtcaaaaatattacttccctagtatactacaaaaaaccttgtttgtaacatgttttttcgcttattttcctgtaaatgttttttcggaaacaggaaggaacaggaaatatacagggaaagttcataggaatttcacaagggacagttgcgaaaaaaataggaatccagtataatagaaaggataataagaggaggaacaaaatggataacaatttgaataaacaagaggacgacaaccggaatccccgggatccgaaaaaaggcggtcccaataaaaaccgtcagtccatcctggcatttcttatttgtctgttagtgactctggtatgcttctccctgtttaccaatatgctccgggacagctccagtgagatcacttatgataaatttattgacatggtggaaaaggatcaggtaagggaagtggtgcttcagtcagatactctgaccatcactcccaagtatcagaccggttcttattctgagcagaaatattataccacaatggcggaggataccacagccctcacagccagactggaaggcaagggaatcgtattttacaaagagccgccggatgtggcagcggagtttttctccatgctgatcactgtgctgctgccaactctgctgctgtttggactgctcatgctcttcatgcgccggatgaacaaaggcggcggtatgatgggtggagtgggcaagagcaaggcaaaggcctatgtgcagaaggagacaggagtcaccttcaaggatgtggcaggtcaggacgaggccaaggaatcccttcaggaggtggttgatttcctacataatcccggaaaatatacaaagatcggggcaaagctccccaagggcgccctgctggtgggccctccgggtaccggtaaaaccttgctggctaaggctgtggcaggggaggcacatgtgcctttcttctcattgtctgggtcggattttgtggaaatgttcgtgggcgtgggcgcttcccgtgtccgtgatctgtttgaagaggctaagaaaaatgcaccctgcatcatcttcattgatgaggtggatgccattggaaagagccgtgattcccgatacggcggcggcaatgacgagagggaacagaccctgaaccagcttttggctgagatggacggttttgatacctccgccggacttctgatcctggcggctaccaaccggccggaggttctggatccagccctgctccgccccggacgttttgaccggagggtcattgtggaccggccggatctgaagggcagaatcgatattctgaaggtacatgccaagggtgtcatgctggatgagaccgtggattttgacgccattgcactggctacctccggggctgtgggctctgatctggccaacatgatcaatgaggcagctatcctggcggttaagaacggaagagtggcagtttcccagaaggatctgctggaatccgtggaagtcgtcctggttggaaaagagaagaaggaccggattttaagctctgaggagcgtaagatcgtctcttaccacgaggtgggtcatgcacttgtgaacgctctccagaaggatgcggagcctgtgcagaagatcaccattgtgcccaggaccatgggagccctgggatatgtgatgcaggtgcctgaggaagagaaatatctcaacacacagcgtgagctggaagctatgctggtgggatatctgggaggccgtgcggccgaggagattgtgtttgacacagtgaccacaggagcggccaatgatattgaacaggcgaccaaggttgcccgggctatgatcacccagtatggaatgtcaaagaaatttggactgatgggtcttgccactcaggagagccagtatttaagtggaagagctgtgctcaactgcggagataatacagccacggaggtggaccatgaggtgatggagctgcttcataaatcttaccaggaggccaaaacgcttctggaagcccacagagaggccttggataaaatcgctgcctacctgatcacaaaggagaccattacaggcaaggaatttatgaaaattttccgggccgtggagcagggagtggagatacctgagaacctggaggagctggagctggtagaaaaccagggaaagaaggaagtgcgctttaaggagaagaagcaggaaactcagaatcaggaagtacacaacacggatgcccaggattcccaagagcaggagaaacaggggaccaaggcagagcttcctggagcagaggctctggtaagtgagggagagaagatttccagtccgttgaaggaaaccatccctacggatcattaattgaagagagtaagaagcccattggctttaaaccatgggcttctctacagggacagtgctgcattcaattgccggcactgtttttcattacataggaaagttcagagaactttcctatgtaatgaatgtaatgaaaactctccgggcagaactctttcccactggcttttgggaagaaaatgcgctataatcgtagaagataaaaaggagagaggccatgtttaacattgaggaagaattgaagaagcttccggctaagccgggggtttatttaatgcatgacgcccgggatgagatcatctatgtgggcaaggcggtcagcctaaaaaaccgtgtgcgccagtatttccagagcagcaggaacaaaggggtcaagatcgagcagatggttacccagatcgcccgttttgagtatattgtcactgattcagagctggaggccttggttctggagtgtaatttgatcaaggagcaccggccaaagtacaataccatgctcaaggatgacaagagctatccttttataaaagtcacagtctccgaagaatttccccgtgtgttgttcgccagaaggatgaaaaaggacaagtccagatactttggcccctataccagcgccactgccgtgaaggatgtcatcgagcttgtgaaaaaggtctttcaagtgcgttcctgcagcagaaacctgcccagagacattggaaaagaacggccctgcctgtattatcatatgaagcagtgcaatgccccctgccaggggtacatcaccaaggaggagtatggcagaaatatccgccgggtgctggaatttctcaacggtaatataaaggatacggtggaggagctcacccggaagatggaggaggcatccacagagctgcgctttgaggaggccatggaataccgggatctgatcaaaagcatcaaggcggtgagccagcggcagaagatcacctcctacagcaatgaggacaaggatatcattgctgtggccatggatgaaagcgaggatttaagagagcaggatgcagtggttcaggtgttcttcgtgcgggaaggaaagctgatcggcagagatcatttctatttgaaggtgggaagaggagataccaaaagccaggtgctcaccagctttttaaagcaattttatgcaggcacaccttttattcccaaggagatcatgcttcagcaggagattgaggagcaggagatcatagaagagtggcttagtgccagaagaggccagaaggtccatatccgcatccccaaaaaaggaacaaaggagaaattggtggagctggctcaggaaaatgccaggatcgttctttccaaggaccgggagcggatcaagcgggaggaaggaagaacgatcggggctgtgcgggagattgaaggctggctggggctttcagggcttgagcgcatggaagcctttgatatttccaatatcagcggttttgaatccgttgggtccatggtggtctatgaaaagggaaggcccaagagaagtgattaccggaagtttaagatcaaatgggtccaggggcccaatgattatgccagcatggaggaggtgctcaccagaagatttacccatgagaccaagggtgagtttgacagctttgccaaacttccggatttgatcatgatggacggcggcaggggacaggtaaacgtggcacagaaggtgctggatacactggggctgtccattcctatctgcgggatggtaaaggatgacaagcaccgcacccggggactgttttttgaaaatgtggagattcccattgacacagacagcgaaggattccggcttatcaccaggatccaggatgaggcccaccggtttgccattgaataccaccgctctttgcgcagcaaggagcaggtgcactccattctggatgacattccgggaatcggggcggccaggagaaaagccctgctcaagcattttaagggaatcgagaaaatacgggatgccacggtggaggagcttgcgcaggtggaatccatgaacacaagaagcgccgggcaggtctacgcctttttccataacaattcctgagggattcattgcagggatggttgggttatgataaaataagataagacagaagcttaaaggagaaaacaaatatgaaaggtgtacagttgacgaaaatgatgcaggagctggggcttcacaatctgactcctgatattgatctcaccggcatcatggtcatgacggcggagatcaacagacctgctttgcagctcacaggatatctggagcattttgccaatgagcgggttcagattatcggatatgtggaatacacatacctgatgcagttaagcgatgaagagcgggcatttaaatacgaaaggtttatttccagcaagatcccctgtgtgattttcagcacaatgacacgcccttcccaggatatgctggacctggctaacaagtaccaggttcccacctttgtaacagagcgctccacctccagctttatggctgagatcatccggtggctgggcgtgcagctggcgccttgtatctccattcatggagtcctggtggacgtgtacggcgagggtgttctcatcaccggcgagagcggcattgggaaaagcgaagcagccctggagctgatcaagcgtgggcaccgtcttgtgagcgatgatgtggtggagctgagaaaggtgagcgatgtgactttggtgggctctgcaccggatattacccggcattttattgagctgcggggaatcggtatcattgatgtgaaaaccttgttcggtgtggagagtgtgaaggatacccagtcagtagatctggtcattaagctggaagagtgggacaaggataaggaatacgaccgcctgggcctccatgaggagtatacggagtatttgggaaacaagatcgtgtgccattcccttcctatccgtcccggccggaatctggcgattatcgtagaatcagcggcagtgaaccacagacagaagaagatgggatataatgcggctgaggagctgtacaagcgagtacaggccaacatcagcagaaaccgtcagtaaacgaaattttagaagagaggtaaagtacaatgggtttatattgctttggtattgatgtgggaggaaccagcattaaatgcggtctgttcctcacagacggaaccttgatcgagaaatgggagatccccacaagagtggaggataatggcgtgaacattcttccggacgtggccaaaaccgtcaaggagaagattcaggagcgtggaattggcatagagaatgtggatggagttggaatcggacttcccggtccggtaaacgacaagggggagattgcctgcgcagtgaatctccactggggattcaaggcagtggaaaatgagctgtcagagatgaccggacttccggcaaaggccggcaatgatgccaatgtggcagctcttggagaagcctggaagggtgcggcagagggatcgaaaaatgtcattctggtcaccctgggaaccggtgttggcggcgggatcatcattgacggcaagattgtggccggcgcccacggcgctgggggagagatcggccacagtaatatcaatcataaagaagaccgggtttgcaactgtggaaacaagggctgcctggagcagtatgcctctgccaccggaattgtacgtctggctaaggatacccttgcctcctgtgaggaggatacggtgcttcgggagaaagatccaatcaccgcaaaggatgtcctggatgcctacaaggcaggagatgctgtcagcggacggatcatggagcgcttcggcgagatcctgggaggctccctggcggtgttctcctgtgtggttgacccggaggtgatcgtggtgggcggcggtgtctccaaagcaggacagcctctgattgacgtgatccagaaatattacagagaatatgccttctccttgagtaaagatacccctatggtcattgccactttaggaaatgacgcaggcatctatggagctgccaagctggtgatacctgaggcataaaagaatcataattgagagaaaaatagtcccgccctcctgcagatacatagcagcattcttgcaggagggcgggacttcttttattattttttcaccgagtctgccttttttggcttttctcagctttcgtccgggatattccagcttggatcaccgccgccttgtccattgggatcctggatgggtggaagattgggatccgtgacatccgggttattggggtccgtaatgtctggattgttaggatccgtcacatctgggttattggggtccgtaatgtccggattgttaggatccgttacccctggattgttggggtctgtcacgtccgggttgttgggatcggattcatccggaagtccggcgttgggatccgtggtcacctgtgggaattgggtcggctgtgtgtattgctgatagtaatgaacattgcagtattccactggggcggtaccctcggcaaaatattctgtctttacagtacagccagagattggaagcagtcctgtggtggagcacacgcttacctgttccacgctggctggcttttcaaattctttccggctcattccctcgtggatgcggctcatgatctttttccacagtacattgtggtaagaacgctgatcctggggaagcttctcattgttgtcataaccagaccagatggcgcaggtatagtacggggtgaagcccacaaaccaaagatcgttgtaatcctctgtggtaccggtctttccagctaccggcatgttggagagctggcaggcggtacctgtaccggatgtaaccacatcctgcatggcgctggtgagaaggtacgcagtggattcagagataacagaccgctccacaggggtgttgtcaatgagcacattgccttctttgtccaaaattttcgtataatagatgggtttgatataattgccgttgttggcgatagccgcgtatgcagcacacaattccacgttggtaacaccgtaggtaatacctccaagggccagagacaggttggcatcgctccatacattcccgtcagtatcggtatcctcggcagttccgtgtgccagagtggtgaagccgaagttatccagatattccagaccaagagcgggagttaccttttccaggcatcttacagccactgtgtttttggaatatttgatggcatctctgatggtgatggttccactgtaagacagatctgcatttcttacaggcgttccgtctggatagaaggtttcctcatcttcaaaggtggttgccagggtcatacccatttcattgagggcaggaccgtaggtggacactggtttaaaggtggaaccgggctgtctggtggaatctgtggcacggttcagggtcaggctggcggttttctctccacggccgcccatgatggcctttacatagccggtgtgctggtcaatgatgctgatggaggactggggctggggtgcaaagcttacacgctcgtccaccgtgcctttggggtggtctgccagagccgctgctttatagcggttcacatattccataccctcctcctggctgtcaaacagcaggtcaaagctgggatcctcattttggaaataaagctccagcatctccttgctgtagttggtctgctggccatccggatctgtgatggtcagtgcataatccagggcatactgtatatatgccgggaaattctccggattggaatattcttcgtccagaatctgctgcatctgacggtcccaggtggaaaataccttaatcccgccgctgtacagcaggttggtggcctgggtccttgtataacctttgatagtgatgaaatcattgatgatctggtcaatgagttcgtcttcaaagtaggaataagccgtattgtctgtagaagtggtggactctgcctgtgcctgctgtatccgggtatacacatcatcattgagagcctgtgtatactgctcctggctgatataaccctgctccagcatccggttcaggacctcttccttacggctggcgtttttctccgggaagagaatggggttgtacagtgtggggttctgggtgatccctgccaaggtggcagattcagacaggctcagatcccatacatccttgttgaagtacgttctggccgcagcctgcacaccataggcgccggcccctaagttaatcgtgttcaggtaattctccagaatgacatttttgtcaccgatttttttctcaatctggatagcaagatactgttcctggaattttcgggtaaacttttcaatccaggaggattcttctgtccagttggtgaacacgttgtttttcagaagctgctgggtgatggtactggcaccctctgagatgttgccctccttgagggccttcacgccggcacggagaatacctctcacgtcaattccgttatgttcgtaaaaacgttcatcctcaatggccaccactgcgtgctgcagatccactgggatctgatccagggaaaccggcagacggttggcatctggagcggccagcttacgtagctgggttccttcatcatcgtagagaaacgatgcatagcccagaggcatgatatcaatgccgttcacatcaggggcattgtcaatgacacctttgaaggcgccgatcccaatacagacacccatgacgataactgcaataagtgatataaacaaaaccctgataaaagacacatgggccctttttcccatcatggatgaccgtgaaataagggctgtccgtttcttggatgttgatttttttccgtaatccatgatattcctccttatagtccacctcattatagcaaatatgaaaaagtattaaaagcccccaaattaaaagttcacagaaaaacttcaatttccatttcattcatgatatgatgataaatacagcagtcaaacctgaagcaaaggtaaaggcagcttctatatttaagtatgtctgctttcgggaaaaatacaaaaaaagaaaaaattggaaataaaggagacattatgctggaacaatataagactgtgtaccagggaggagagggagagatcattgagaagaaatcccggttcatcgccactgtgcgccttgtacagtccgaggaggaagccctggcctttattgaggaaatgcggaaaaaatattgggatgccacccataactgttatgcttatgtgattggacagcgcagagagatcacccgctgcagcgatgacggagagccgggaggcaccgcgggaagacccatgctggacgtgctgctgggacaggagctatatgataccgccgtggtggtcaccagatatttcggggggactcttctgggaaccggaggtcttgtgcgggcttattccaaagccgtccaggaaggtcttctgtgcagcaggctgatagagaaaaaacacgggctggtcctggaagtggccacagactacaacggggttgggaagcttcaatatctggcgggagaacggaaaatccccgtcctggacgcacaatacacagaccgggtggtccttcagcttctcgttccctacggccaggtccaggaggtggagaaggccgttacccaggccaccagcggacgtgcccgtatggagagaaagagagagctttattacgcatccctggacggggagcagcttttatttgatgcttaacaggtcttcggctgcggatagtccaccccaaaggtttctacagtcatggatttgatcacctggtcatccagaggacggtcactgtaatccgtgtcttcctgggcaatgcggtttaccacatccataccctccgtgatcttaccaaaggcggcataggagccgtccagatggggagctgccttgtgcataatgaagaactggcttcccgcagaatccggatgcatggctctggccatggagaggaccccaggggtatgagccagggtattgtcaaaatgattctgtgcgaactcacccttgatgttatatcccgggccgcccatgccggttccgtccgggcatccgccctggatcatgaagccattgatgactctgtggaagatcagtccgtcataaaagcctttttttaccaggctgatgaagttgtttacagtatttggagctatttccgggtataattcagctttcatcacatcaccgttttccatggtgatggttacaattggatttgccatattgattctccttttaattgattcttattttgccggtaacgtgttaccgcatttattataatgtacattggcatatcctgcaagaaaaaaggtagaagccggggaaaagttatgctatcatggtgactggtgaacggactgcgggcctgccggtgaacaaagaacctgggacagactgcgcaggtggaaagtgaaaggaaatgagaagatgatgataatagagaccagaagcgcccaggaaacctttgagctgggaaagcgtttaggtgaaaaagcccttccgggacaagtctataccctggtgggtgacctgggagtgggaaaaactgtttttacccagggtgtggccagaggcctgggaatccaggagcctgtcagcagccccaccttcacgatcattcaggagtacgaaaggggccggcttcctttttatcattttgatgtataccgcatcggagatattgaagagatggaagagatcggctatgatgattattttttcggggaaggtgtgtgcctgatcgaatgggcaaatttaatagaagaacttctgccggatgacaggatctccataaccattgaaaaggatctggagaaaggttttgactaccggcggatcaaaatagaagggatggatacattatgaaagtattagcgttggacagctctgggatggtggcctctgtagccgtggtccaggatgacaatctgctggcagagtacacggtgaattataagaagacgcattcccagaccctgcttcccatgctggatgaagcagcgaagatgatcgagctggatctgaacactctggatgccatagcggtggccgcaggccccggctccttcacgggactgcgcatcggagcggccactgccaaggggctgggactggctctggacaagcccttggtggcagtgccaacggtggatgccctggcctacaacctctatgatgcccagggggtggtctgcccattgatggatgcccggagaaatcaggtttatacaggaatttatagattttccggccataagctggaggctgtgagagagcagatggcagtgggaattctggatatcctagaggagatcaatgaccttggggagggtgtcacctttttaggggacggtgttccggtgttccgggatgtgatcgccaggaccctgaaggttccttattcctttgcaccagcccatttaaataaacagcgggcaggagccgtgggggccctggccctggaatatatgaagcagggaaagatccaaagcgctcaggagcacaggccggagtatctgcgcttgtcccaggcagagcgggagcgggcagaaagggaaggaaaacagaaatgatcctggttcgggaaatgctggtggaggatctggaccaggtgatggagattgaaaaccatctattctctgtaccctggaccagagaaggttattttacttatcttatgaaagcagaggcactttttctggtggcagaggaaaaaggggagattctgggctactgcggggtgctcatggttttggatgaaggagatatcaccaatgtggcggtgaagtcctcccgacagggggagggcattggcagacttttggtaaattccctggctctgctcactggccagcggggagtcagaacccttcatctggaagtgagggagagcaaccacagagcgatccgtctctatgaaagcaccggctttgtaaaggacgggctgcggaaaaattattataccgatccagtggaagcggcggttttaatgagccggtttcagtgaggcggcaagagacataggatggaagaatacagagatgaagcactttaatctctgtatggagttatggaaaatctaagacaaagacgaggaacaatatgttagatgtatgtttagtagggtgcggcggcatgatgccgcttcccaggagatggctgactgctcttatgacccgctataatgggagcagccttctcattgactgtggagaggggacccaggttgctataaaggaaaaaggatggagctttaagcccattgacgtgatctgttttacccattaccatggagaccatatcagcggccttcccggtctgctgctcacaatggggaacgcagagaggaaggaaccgttgacactggtgggccccaaggggctggagcgggtagtgaacgctcttcgggtgatcgccccggagcttccttttgaaataaaattcatagagctttcaaaaccggaggaagtgttggaattaaacggatacaagatcacggccttccgggtaaaccacaatgtggtctgctacggctattccctggagattctccgtcagggccgtttttcaccggaaaatgccagagaggcaggaattcctctgaaattctggaatcccctgcaaaagggcatgaccatggaggatgaggacggcagggtgtacacgccggatatggtccttggcccgccgcggaaggggatcaaggtcacctataccacggatacccgccccacagagtccattgccagaaacgcggcaggctcagacctttttatctgcgagggcatgtacggagagaaggagaagctggaaaaggcgaaggaatataaacatatgaccttttatgaggcagcggacctggcaaaaaaagcccaggtaagtcagatgtggcttacccattacagcccgtccctcatccgccctgaggaattccttgaagacaccagggccatcttcccagagacctatcctggcaaagacggaaaatcggcggaattgaactttgaggaggaatagaaatggaagatacattgattttggcaattgagagctcctgtgatgagacggcggcagcggttgtaaaaaatggaaggaccatattatccaacgtgatctcttctcaaatcgatctgcacaccctctatggaggggtggtgcctgagatcgcatccagaaagcatattgaaaaaattaatcaggtgatcggggaggcccttcaggaagcgggagtcactttggatgacctgacagccgtgggagtcacctacgggcctggactggtgggcgctctgttggtgggagtggcggaggccaaggccattgcctatgccaaaaagctgcccctggtgggtgtccatcatattgaaggacacgtatcagccaactatattgaacacccagatttggagccgccttttttgtgtctcattgtatccggaggccatacccatttggtgatcgtgaaggaatatggggaatttgaaattttagggcgcacccatgacgatgctgccggggaggcctttgacaaggtggccagagccattggactggggtatccgggcggtccaaagattgacaagctgtccaaggaaggcaatccccaggcgattatttttccaaaagggaaaatcggggactctccctatgatttcagcttcagcggtgtgaagtcagcggtgctgaattatctcaaccaggcacagatgaagggagaggacgtgaatcgggcggacattgccgcctccttccagaaggctgtggtggatgttttggtggagcataccatgcaggcggccagggattttcatatggatcaggttgccattgccggtggcgtggcatccaatggtacccttcgggaggcaatgacaaaagcctgccaggagaatggttttactttctatcgcccatcccccattttctgtacggacaatgcggctatgatcggagtggctgcctattacgaatacaaaaaaggaacccggcatgggtgggatctgaatgcagttcccaatctgaagctgggagagcggtagtgggaccaggaggcgtgatgatggaaaagcggtgtacggcaattttgcttgcggcaggccagggaaagcggatgaacagtccggttcagaagcagtttttggagattggcggcagaccggtgctgtattattccctcaagtgttttcaggaaagcgacattgtgacagatattgtgttagttaccagcgaagattgtatagcctattgtgagaaggagatcgtggaggcatatggattttccaaggtgaagcagatcattcccggcggcagagagcggtatgattctgtatatgccggacttttggcctgttccgggaccgattatgtgatgatccatgacggggccagaccctttatcaccccggagattctttcccgaagtctggagaaggccatggacacaggcgcctgtgtggtgggaatgccatccaaggataccgtgaagctggcagatgaaaaaggctgtgtgcaggatacccccaaccgggagcaggtgtggatcattcagacaccccaggtgttctcctacccactggtgcgtagggcacatgaatccataaggaagaaagatatgtctgccatcacggatgatgccatggtagtggagcaggagacaggggtgagcatcgcccttgcccatggatcttacagaaacattaagattaccactcccgaggatctgctggtggcggaagcctttttgtcacaagggtaaatctggaattttataggaaaatttgaagattaggaataaaaagaaaaatattgcaaatccttgttgacagggaagttattccatgttagaatatcccttgcgctggtgaaaaaacacagcggaaacaggtgttgcagtatatggagagatatcgaagtggtcataacgaggcggtcttgaaaaccgtttgtccgcaagggcgcgtgggttcgaatcccactctctccgctccttttgtcaacacataaagttctgaaaaagaattgcaaaaaaagagaaaaagtgcttgacaaaagaaaacaatataagatataataattaatgcttctggcaaatgttggaagaaaactgaaaactctatgtataagaatagggcaatttggagaagtacccaagctggccgaaggggctcccctggaaagggagtaggtcgttaatagcggcgcgagggttcaaatccctccttctccgtttatcacaaaaatatctggaaaatatatgttgacagatgattgaaagtgtgataaaatgcgaaagctgtttcgaggaattcgaacagcaaaagcaaaaaaactttgaaaaaagttaaaaaagttcttgacaaacagaaaacagcgtgataaaatatcaaagctgtccaaaacaagaacagcagacaaccttgataactgaacagtgaaacacatacgattctcgaaaattctttaagaagatttcaaaaagaacaaattcgaaccaaacagtaatgaggattctaggatagctaacgttatcttgagaaatcaaactttatcagagagtttgatcctggctcaggatgaacgctggcggcgtgcttaacacatgcaagtcgaacggagatcagtttgacagagacttcggttgaagccgatctgatcttagtggcggacgggtgagtaacgcgtggggaacctgccctgtaccgggggataacacttagaaataggtgctaataccgcataagcgcacagcttcgcatggagcagtgtgaaaaactccggtggtacaggatggacccgcgtcagattaggtagttggtaaggtaacggcttaccaagccgacgatctgtagccggcctgagagggtgaacggccacattgggactgagacacggcccaaactcctacgggaggcagcagtggggaatattgcacaatgggggaaaccctgatgcagcgacgccgcgtgaaggaagaagtatctcggtatgtaaacttctatcagcagggaagaaagtgacggtacctgactaagaagccccggctaactacgtgccagcagccgcggtaatacgtagggggcaagcgttatccggatttactgggtgtaaagggagcgtagacggtgacgtaagtctgatgtgaaaggctggggctcaaccccgggactgcattggaaactacgtgactggagtgccggagaggtaagcggaattcctagtgtagcggtgaaatgcgtagatattaggaggaacaccagtggcgaaggcggcttactggacggtaactgacgttgaggctcgaaagcgtggggagcaaacaggattagataccctggtagtccacgccgtaaacgatgaatactaggtgtcgggtggcaaagccattcggtgccgcagcaaacgcaataagtattccacctggggagtacgttcgcaagaatgaaactcaaaggaattgacggggacccgcacaagcggtggagcatgtggtttaattcgaagcaacgcgaagaaccttaccaagtcttgacatccccctgacgtgtccgtaacggggcatttcctccgggacaggggagacaggtggtgcatggttgtcgtcagctcgtgtcgtgagatgttgggttaagtcccgcaacgagcgcaacccctatccttagtagccagcagtgagatgggaactctagggagactgccagggataacctggaggaaggcggggatgacgtcaaatcatcatgccccttatgatttgggctacacacgtgctacaatggcgtaaacaaagggaagcagccctgtgaaggtgagcaaatcccaaaaataacgtctcagttcggactgcagtctgcaactcgactgcacgaagctggaatcgctagtaatcgcggatcagaatgccgcggtgaatacgttcccgggtcttgtacacaccgcccgtcacaccatgggagtcagtaacgcccgaagtcagtgacccaaccgtcaaggagggagctgccgaaggcgggaccgataactggggtgaagtcgtaacaaggtagccgtatcggaaggtgcggctggatcacctcctttctaaggaagaagaagtagagtgttggagtgtttcactgttgagttatcaaaaaagataacaagaactttctggtgccgatgcgtctgggggagacacccgttcccatcccgaacacgacggttaagacccagacggccgatggtactgcactggagacggtgtgggagagcaggtgggcgccagatcaaatggggatgtagctcagttgggagagcacctgccttgcaagcagggggtcgagagttcgaatctcttcatctccattttccataaacagaagatggaagacgggcttatagctcagctggttagagcgcacgcctgataagcgtgaggtcggtggttcgagtccacttaagcccatcggtccaaaagatatagctggaccgtacatgcaccttgaaaactgcatacatgtaaaaaatctattcaaacgaatagatatccttgaaaaagagtatcctaaggatatcgcaagatatacgagggatgcaaacgcaagataggaagacatcgaagacgaatctgcgagagcagaggagtcaaagatacaagaataatcagagaacgaaccgtatgttcctaacgctataggaacatagcaaaggtcaagcaataagggcacagggcggatgccttggcactaagagccgatgaaagacgtgataagctgcgaaaagcttcggggaggagcaaatatcccgtgatccggagatgtctgaatggggaaacccgtctgagaaaacctcagacatccatacgccaatccataacgtatggaagggaacccggggaactgaaacatctaagtacccggaggaaaagaaagaaaactcgattcccagagtagcggcgagcgaaatgggaggagcctaaaccggcgtgcgtgcatgccggggttacggactgcgattaagatccaggaaggttaacggaacggttttgggaaagccggccagagagggtgaaagccccgtacgtgaaaaccagagaggctgagcaggatccagagtaccacgagacacgtggaaccttgtgggaaatcagggggaccaccccctaaggctaaatactacttagtgaccgatagcgcatagtactgtgaaggaaaggtgaaaaggaccccgggaggggagtgaaagagaacctgaaaccctgtgtctacaagctgtggaacaccgttaagggtggaccgcgtactttttgtagaacggtccggcgagttacgcttactggcaaggttaagtccttaagggacggagccgtagggaaaccaagtctgaacagggccagagtcagtaagagtagacccgaaaccgggtgatctatccatgtccaggctgaagccgccgtaaaaggcgatggagggccgaacccacatccgttgaaaagggtggggatgaggtgtggataggggagaaattccaatcgaacccggagatagctggttctcctcgaaatagctttagggctagcctcggcagagattaacggaggtagagcactgaatttcctagggggcgtcaaagcctaccgaagaatatcaaactccgaatgccgtataatcgattgccgggagtcagactgcacgagataagttgggcagtcaaaagggaaagagcccagacctccagctaaggtccccaagtgcgtgttaagtggaaaaggatgtgggatctcccagacaaccaggatgttggctcagaagcagccatgcattcaaagagtgcgtaatagctcactggtcgagaggtcctgcgccgaaaatgtccggggctgaaacacgacaccgaagctgaggaatcagagatgattggtagaggagcattgcatgcggagagaagcagtaccgtgaggagctgtggactgcatggaagagagaatgccggaatgagtagcgagatagaggtgggaatcctctaggccgaatatccaaggtttccagagtaaagctgatctgctctgggtaagtcggggcctaaggcgagggcgagagccgtagccgatggacaacaggtggagattcctgtactgcggtatgacagaactgtggggacacgtaaggagagcggaagccgggagtggaaagcccggcccaagcggggtaccagatgcaaaggaaaatccgtgcatcaatgggaagccgtgacggggagcgaaataaagtagcgaagaccgtgagccatgcgtcaagaaaagccgctatcgttcataccgtacccgtaccgtaaaccgacacaggtggatgaggagagaatcctaaggccggcggaagaagcattgtcaaggaactcggcaaaatgaccccgtaacttcgggagaaggggtgcctgggaaaccaggccgcagagaataggctcaagcaactgtttagcaaaaacacaggtctatgcgaaaccgaaaggtgaggtatatgggctgacgcctgcccggtgctggaaggttaaggggagaggttagcgcaagcgaagctttgaacttaagccccagtaaacggcggccgtaactataacggtcctaaggtagcgaaattccttgtcgggtaagttccgacccgcacgaaaggcgtaatgatttgagcgctgtctcgacaatgcatccggtgaaattgaagtaccagtgaagatgctggttacccgcgccaggacggaaagaccccatggagctttactccagcttggtactgggatccggtattgcatgtacaggataggtgggaggctgtgaagcggtgacgccagttgccgtggagccaatgttgggataccacccttgcagtattgggtttctaaccagccgccgtgaaccggcggtgggacaatgccaggcggggagtttgactggggcggtcgcctccgaaagggtatcggaggcgctcaaaggttccctcagaatggacggaaaccattcggagagtgcaaaggcagaagggagcttgactgcgacaccgacgggtggagcaggtacgaaagtaggacttagtgatccggtggtattaagtgggaatgccatcgctcaacggataaaagctaccctggggataacaggcttatcactcccaagagttcacatcgacggagtggtttggcacctcgatgtcggctcatcgcatcctggggctgtagtaggtcccaagggttgggctgttcgcccattaaagcggtacgcgagctgggttcagaacgtcgtgagacagttcggtccctatccggcgtgggcgcaggatatctgagaggagctgtccttagtacgagaggaccgggatggacggaccgctggtgtaccggttagactgccaagtctacggccgggtagccaagtccggaagggataaacgctgaaggcatctaagcgtgaagcccccctcaagatgagatatcccattcttaggaagtaagaccccttgaagacgacgaggtagataggacagaggtggaagtgcagtgatgcatgtagctgactgttactaatcggtcgagggcttgaccaaaagaaaaagcccagggctagtaactctggcgggaagttcaaagaaaaaaagcatgtatgcagttttgaaggtgcaggccttcaagagaagatgacggaagtcattattcctccttagctcagtcggtagagcattcggctgttaaccgaagtgtcgttggttcgagtccaacagggggagctttcggattgacgtgaagtccgatatttttaataccaggctccatggtcaagcggttaagacaccgccctttcacggcggtaacaggggttcaaatccccttggagtcactcttttacaagtagtgcatagaataatataaatatggcgccatagccaagtggtaaggcaaaggtctgcaacacctctatcaccagttcaaatctggttggcgcctcttgagaagcctcggaaatcttaaatttccgaggctttttctttgtgtcacagtaaaaagcagttaatcatataaattaactgcttatgctttttaatataaagttatagataaactgggatttgtgttttataatttttgtatttctttcaatgctttttgaatatccttataaactaagggctgcatgctatcgtcataaacagatatatttgccttatgaagtgcggaaacaatatcattttttaattctggcttatactttgcaacaattgggagcagcttaatacactgtcttgccgtaataggtttcacatctgttatgtgttttaaatatttatcaatgatttcatcaattttattatctttatcccattttgcattataggcaaggagtataagccctcttgtgcggatataagaattatcactgtcaagcatatcgcttaatcgatccatataaggataaacacaatccgcttctttgctttctttttgcaattcctgtaaagccttatatgcaacattattatttttatcgaacaataattcaaatgtatctgctatattaagtaacataagattctccttcggaacttccaacttatagagatattatacacctattaagtaccattaacaacaaaaatgagtaattactgattgctttgcatctgctggttgttatggttctgcagatttcctgctatctggtcagactgccagcaggaatactggatggtcttaccgtcaggatgtgagaccacaatcgtacccgaaatcataatcgtttttctttcctgtcagttcaatactatagaaatacccctttttaactcccaggaaaaataagttttcgggagttcctttgttgcagttgtatgaactacaaaccggttttcatctttaaaggtgttataaagaccagccaaataaagagtttgttcatcagggagattgaattggtattttgtcttatgcaatacacgggcattggggatatgttgacacagaacaggctgcattcgggtataattgggagaattagaatttttatgatccttgcttaaaaggcataaatagaatataatatgcttattaaggcatggataaagcaggaaggagttcgcatatggaaatcagggttcttcgctattttctcaccgtggtcagggaagaaagcattacaaaagcctcggaagttttacacatcacgcagccaacactttcccgtcagcttgcgcagatggaggaagaaatcggagtaaagctgtttgacagagggacacggaaaatcaaattgaccaatgaggggattcttcttcgccgctgtgcagctccttccgaaattgattgactactttcgtcaaaaatatccacaagtcagctttgatatttttacggccacggcagatttggtaaaggagcagatggataagggaatattggatattggcgtgcttcttgagccgattgatatggaaaagtatgaatttatccgcttgaaaataagagaaaaatgggtagttctgatgcgcccggatgatccgctctccgaaaaagaaactgtaaccgcaaaggacttatcttcattgcccctgattcttccacggcgtatgaatgtacagagtgaattagcaagctggtttggcagctactatgaaaaattgaatgttgtttttaccagcaatttgagtacgaacagcgcagtcatggtaaatggcggattggcatattcgctggtcatagaaggagctttgcctttctgggatcaatcaaaggttacatacagaccgcttgaaccgccacttacagcaacgagtgtactggcatggaaacgtgggcagcctttcagtttggcagctacgaattttatccaacatatacaatgctttccaggcattggtaagggataaggatcaagtatttgatatagagtaagcaagagattatgatgtaggtgtagaggagcagcaaattgtttcgatttttgcacctgcattgttggttgggagggagtgccatctcatgaaaccagattattattcccttgcaaaagccggattaaacaaagaagaaattgcaaaaatttccgggtgtgaggattgggaaatacaaataaggatgttgcgtaaatgccggtataaattgcttgacgagatacatgaaaagcagcaatctctggatacaatcgattatatgatttgcaaaataaaagagcaacaataaaaggaggaggtagtctatcagacgaatacaatctgtcctgcttgttttctctgctttttatgttgacggcgacctgcaccggggtgagacgggtactccgtatacggcagactttgatggtttgtgactggatcattcgggcggtcattttcttccggcggcagaaatccgggaagtggaaaaaattccgggtgatataaatccgtttattattataagttcaataacacaattcatggaggtatttattatgagcaagaaaatgttagtggcatatttttcggcaagcggagtgactgcaaaggctgcacaaaaactttctgaagcggcaggggcagatctgtacgagattaaaccagaggttccttacagcagagcagacctggactggacaaataagaaaagccgtagcagcattgaaatgaatgatccggcattccgccctgcgattgcagggaaaatggaaggtatggagcagtatgatgtggtgtttgtcggctttccgatctggtggtacgtggccccggcgattatcaacacttttttggagagctacgacttttcaggcaaaattgtcgttccttttgccacttccggtggcagcggcatgggaaagacgaatgaaaagcttgcgctaagctgtcctggcgcgactctgctgaaaggaaaaatgctgaacggttctctgcctcaggaaggactgaaagcatgggcgcagagcttgtgagaagatagatcatcggatttctgacactcgctatgctgtgtttcgttactgcttgtggttcacaggaatccagtgatatttcaatgccggaaacatatatttcggaagatatcacggaaatgagtctgctgataggacagatggcagagtggattcggcaggaggttgaagggaggaagcacttatgcaataccgtaaattgccgaaaggaacggaacagatcagtgttcttggaattggcaccagttccattcaggcgtcaagtgaaaaacaaatcgaaaagattataaccgccgctatggagaagggaatcaattattttgatatggcttcatcagaagcaaagccatttgctgtctatggacgggcgatgaaagggatgcgggataaagcatatttccagattcattttggagcaaattatgaaacgggagtttatggctggacaacaaacctggataccattaaacgctctgttgactggcagctaaaggcgctgcagacagattatattgattttggattccttcattgcattgatgaatcggcggatctgcatgaagtagaaaaaattggaattattcgctatattcaagaactaaaaaagactggcgtggtcaggcacatcggtctttcttcccataccccgcttctcgtgaacgaggtacttaatatggggattttggatatgctgatgttcagtatcaatcctgcttatgattatgcaggaggaaccggactggattacgcggcagacagttatgcggttggcagtgtggcagaaagaatgaacctgtaccgccgctgcgaagcagagggcgtgggtatctctgtaatgaaggcttttagcggagggcagctgttaaaagcagaaatctcaccgtttgggaaagctctgacggaatatcagtgcattcagtatgctttggataaaccaggcgtcctgactgtgcttcccggtgtccgcaacatggacgatctcaaccgaattctcggatacttagatgccgcgccagaggaaagggactattcggttctaggttcttttgcgccgcaggacgttgcaggaaaatgtgtttactgcaatcattgccagccatgccctatggggctggatgtggggctgatcaacaaatactatgatctttccagagtcggtgatctgctggcaaaaagccattatgaaaatctcactgtcaaagctggtgcttgtgttggctgcgggcattgtaacaatcgctgcccgtttcatgtggatcaggttacaaggatgcaggagatttcagcctattttcattgttgaagggagaaagatgacagaaaagaattcaggaaaatctttccattgagggagaaaagatggttgtcgttagccatcttttttctttttacaaaagtaagttccttccaaatatgttttcagcatagcttcatccactcttttcacctttatttataccgtgatagtaaagaaatgtgtcaattatattatggacagaagaaatatctgcattgcctccataattgactatgttgtactttttaaaaatgattccggatagatggtatgctctgcaatcggatccagacgggaaaggtgtgtatccatgagcataataccgcgctgcactgtatagtgcccataccgctgccgtatttggtcaatagcgcgttccagatcttcctgcttttgatccttcatggcgttttccagaaaggataattggcggtactgggagactaacaggttacatgcccgaactccaaggctgcggacgggattttgcggcggattatctttaaaaagagcaaaagctttttcaaagacagcctgtgaagtgcaggatggaatcgcaagccgcccctgtcgttcataagacgcaagggtgttgtcccgtatactgatctggatactgcggcagtagaagtgctctttgcgcattcgttccgccacgctttcagatagaatgtataaaataatcttaatatctgtatcatcagtcagatcccggggagtggtggtgctgtttccaatcgtttttatgatccgccgggaataggtatgggatacgggcgactggtcaaggccattggcgaaggcccagagcatgattccatttttccccaggagccgctctaaaaatgaaatatcggcacaggccagatcgccgatggtttgaatcccgtatttcaacagtttggcataggtggcgcggcccacgtataacagcatatctgccggaagctgccagattttttccttgaaatcgtcaccgatcactgtggtggcatccggctttttcatatcactgccaagctttgcaaaaattttattgtaagatacgcccacgctggccgtcagcccaagctccttcttcacacgtcctcggatttcatctgcaatctcctttccctgtccgaacaggttcgtagattcggtcacatccagccagcattcgtccaggccaaagctttccacccggtccgtgtattcttcataaatctcatgggcagcctgagaaaactggatatagcggtcataccggggtggaacaaagataatatccggacacttttgccgtgccatccacaggggctctccggtgatgaccccaaatttctttgcctcgtagtttttggcgagaataatgccatgccgggcatctggatcgccggtgacggcaattggttttccacgaagctccgggttatccaggcattccaccgttgcataaaagttattcatgtcagaatgcaggataatgggcatatccataggttagcatctccttaaatgtgatagacttattgtttgatgaaatagttgtttttatgtgattttatctttagaaaaggaattacccgaaagcaatccctcaataacttaaggttccactgtaataattcttttatcctccataggcaggaaatgaattgcgggatacgacgttttattggtggggtgacatgccgatggtttttgtttgtgtatcttttgaacgatgtaattgtaaaggaagaggtgctttgttataatataaattaggttaaatatttagatgacaatgagttgaggggattaaaatgagagaaattaacagaacttttgacaaagttgttactattatacaagcagcaaaaaataaggcatatcgtaaagttaatgaagaactaataaatatgtattggtatgtgggaaagtatattagtgaagaagtaaagggtgcatcatatggggaggcgttgattgatgaactggctgaatatatacagaatgaatttcctggaatcaggggatttaatcggcgcgggttgtatcgtatgaaacagttctatgaggcatatgcagattatgaaaaagtgtcgccattggtgacacaaattagttggacgaataatttgctgattttgtcaggaacaaagagtattgaagaaaaagaattctatttaaaactatgtattcaagagcgttacagtaaacgtgaattagagaggcagcttgatagtggatattatgagcggtatgttttgtcactggggaaagcgttgccggaaggaataaaagcagtaaatacgaatccatttttggattcttatgttattgagtttttggatttacctagtccatacaaagaaaatgatttcagaaaagcgctaattttaaaaatgcgggattttatattagaactgggtaaagactttacctttattaacgaggaatataaagttcaggttggaggggaggattattcgattgatcttttgttttttcaccgtggtttacaatgccttgttgccgtcgaattgaaaattggaaggtttaagccggaatatgtttcaaaaatggatttctatctggaggcattggataggcaggcgaaaaaagaacatgaaaatccgagtgtaggattgattttatgtgcatctaaaaatgatgaagtggttgaatatgctatgagcagaagcatgtcaccgatgctggtatcggaatacatactgcagttgccggacaagaagctgctaagagaaaagctacaagagttggtaaatataccagaaattgaggaggggtgaattgtgtcaccgatggtgacataatttaaacattaactttaatgttggagaaaaaactgagatgtggataagggtgggaattatgattctgtctaaaattaaaattaaaaattatcgacttcttgtaaatactgaactaaatgttgatagcgatatcaccttgcttgtaggttgaaataatactgcaaaaacatcttgtatgaatttaatcgagaaagtccttgataataagatgctttcttgtaattaggtgcactttctccctttattatcgatgtagactctgatattactacagttttaattagagcagaatataaattaaagatggatgaggattcacttcgaactctattttcaccttgctattttgtggatggtttatttgcccataattttgaagagacgagggatatctgtattaaatattttcctaaaatatttgaattggtcatttatgctgttaatccaaatgatgtaaaagatattcaaactaagaaattatcggaacttactgaacttatgccgttctatcctatttatgctgagaggagccttggagagggaaacagacaagagaacagacaagagaacagttcgttaggttcacttatttctagctattttaaatggttaagggagattgggtactaaaggaggataataaattgtattctgccgtgaagcccatcattttttagtagaaacccatgtgtttcagcagcagaagacagagaaagaatacttcccgtctgccgggctgaaaattgtgaattgaccgcattgaaaaggagaacctatgacagaattgatgaaaaataagtattacaattacgatttcctccacgagctggccttgcgtatccaagccgtgcaccactcatttcaggttgatgattttgtgagcgacattatggacgaaccatgggattccttggagctaaaagcccgtatgaggaagatcactgtgaatttaggaaaatatctgcccgccgactatgagcaggcgcttggtattatcgacaaagttgttgcgggatttccccctggattttacgatttttctttcatgtgtttcccggattttgttgaggttttcgggcaggaggaccgctattttgacttgtcaattgcagcgttggaaaggtacagtccatgctcaacttccgagctggcggtgcgtccatttatcataaatcacgaggatcctatgatgcgtcagatggtgatctgggccaagtctgacaacgaacacatccggcggcttgccagcgaaggctgccgtccacaattgccatggggacaggccttgcccagcttcaaacgagacccttctccggttcttgctgttttagaactgctgaaagctgacccatcgctgtatgtccgtaaaagtgtggccaataacttaaatgatatttcaaaaacacatccagacctggtggcaaaacttgcacaggagtggtatggcaaaaataaatataccgattggattttaaaacatgggtgcagaacacttttgaaaaaaggtaataaagatgtgcttcgtatctttggcttttcagatgcccggcatgtgaagatcagcggctttacgctggacaccacatccgtttccatcggggagaacgtaaagatttcctttatgatctcagctgacacaccaacaaagatcagactggaatatgccatcgactatgtaaaatccaacggaaaaccaagtcgaaagatatttcaaatatccgagatttctttgaaagcaaatcaagaaaaagcatacacaaaaacgcattcatttgcagatttaagtacaagaaaacattatccaggaatccatttcattacacttattgttaatggaacggaacgcggtacattagagtttaaattgctgcctgctgaatgattgactcaatggcccatattatcccataacaaactatgactgggcatagttgccaggaaacgtgtaaatgataagagagcagctacgtttcattttctttgcagggcgcaagccctgtacacccccataagccgccagagcagataggttttcctgcttaaccgttcaatgggatcaatggaaatctgtatcaagatactgccgcaatacctctaaaaatttttgcgatggcttagaaaatacctgatatttcttccagataatgctcagttcattttccagcttgggtgtaaggggacggaagcagagactgctgtctccggaggtattgattatatgatctaagccaatcacatatcccagcccttcctcaaccagcaaagaagcattaaacataagattataagtagcaacgatgttcaattcagatgcatcctgttttaaccatctggtaatatctcccccacgattttcctgttgagacagaattaatggcttgtcccataaatcctccggggcaatcccatctttttttgcgagaagggaatccttgcgcattaacacgccccatagatctgtatcagacatttttaaggcgttgtattttgtaagatccacgtttccaaatacaattccaaagtcaatcagtcccttatctaactgctccaagacaaaagtggcatttccactggaaatatggtaatggattccggggtgtgactcttgaagtgttttagcagctttggcaatcaaacgcacggcgtctgtttctcccgttccaatatagacatcccccataataatattgtcggagagtgtgatctccgtctctgtcttttttaccagagctaaaatttcctctgcacgtttccgcaggatcattccttcttctgtcagggttaccttccgtgatcctttcgttccccttataagaagctgcttgcccagttcttcttccatgttttttatctgtgtagaaagtgttggctgagataggtggagagactcagcagcccgcacaatactttgttccctggctattgccagaaaataatgaagtacccttaattccatctagaaatcccctttctaattaaatttactgctttccttttacgaatactctaacataaaatcaaataggtttcaactatgataatggatatgatataagtattggctattatatcggattgctattatactgtaattgaaaacggaagctggtctaacgtgtggtatcaggatcaagaaatcaggaggttacgataatacaatgaaaagttttgagaccagagaagcggttgctcaaaatctaaaagatgcaggatgtggtataaataccattgaggattttatggaatattatgacacgggaaacgtaagggagcagctgctattactggaaagacatcgaaagcagcttttaagcagggtacatgaggaagaaagacatatctcctgtctggattaccttgtctatcaaataaaaaaataaatgcattctatgaatgtgtggaaagaagggtatttatgagtaaaaaagtgttaataatttctaccagtctgcgcaaaagcagcaattccgaaatgctggcagaggaatttatgaggggagcaatagaagcaggaaatcaggcggaaaaggtcagcctgcaaaataagaccattggattctgtaagggctgccttgtctgccagaagacgggacattgtgttatcaaagatgatgcggcagagatagcacagaagatgctgactgcagatgttatcgcatttgccacccccatctactattacgaaatgagtggccagatgaaaactatgttggacagatctaatccactttttccgtcagactatgcatttcaggatatttacctgcttaccactgcggcagatcgtgatgaggacgctatggacggcgctaggaaaggccttgaaggatggatcgcctgctttgagaaagcacggcttgcaggtacagtatttgccggcggggtggacggtcctggtgagataagaaagcatccggctttagaaaaggcatatcacatgggtaagaatatctgagccggtggcaggaataccaaaaaacaatcatcaaggaggagatgtaatattatggatgcaaagatgttagaaggaaaagtggcgatcatcaccggggcaagctatggtatgggccagtgtatggcagagctgtttgcccaagagggagccagtgttgtgcttactgcaagaggcagagagaaattagatcaggtggtagaaggaatccgcgctaagggcgggaaagctattggtgttgtcgctgatgtgtgttctacagaagatacgaagagggtaatggaggaaaccatacatacctttggtgatctggatatcctgattaacaatgcagggatcggggaacagaaaatgattgatgagacagaggatgactggatgatgcatgtgatggataccaaccttggcggaccgatgcggtatatccgggaggccctgaagatttttatgcctaaaaatgaaggagttatcatcaatatctcctctgtaaatggaagccgtcccttctgcggagccacttatacatccacaaagggggcacttaatactctgacgaaaaatgttgccatgagactggtagataccaatatcagatgcaatgcagttgcccctggtgcaacggttactccggcacaccttgcaaataaggctggggagcagccaggaggagcaaaaatgctggaatacagcggccattatgtatattttccgggcccggaatgcgatcccatggatcaggcttatgcgtgcctgtatctggcgagcaagatgggtaaggctgtgcgtggacaggtactgcaggtctgcaacggggcatttttataatttaaaggaaataatatactgcattaggacaggagaacgttattgctgccccaattgtcctcagggttatcacatcccagagtatatggaagaaatgaaaaacatgatggagcaggggtagtttataaattgtttagttttttgtgagaaatcttttattcccgtgtgataccctgtattttaaataagaaaaaaatataaaaaacaggagagaccgcgttcatggaaaagaagaaatggctgttgtgggtgtctatagccacaaagatcttgtcatttaaacaaagaccgggatttgatgccatagaaacagaaacactggaagaatattgggcaaaagtacattcatttcttgatacagggtatcgggtttggtagtgataagggagagcaccacattgacaatcaaaaagaaaatcaggatttctaatattatgatggttctgatccccattttatttacggcaatcgtgataaatgtgtgccttcatacgtcattggggagttactggtatacgctggaagccatgtacagcgatgaaaacagtatccagtttgcccagagcatgatctacacttatcagcaggaactgtgggagaataactgggggcaggggaaatacccggacgcattatctgagatcaaccgcagtgacgagatgaaccatctggagaataagctgtctgggatgggatatcagttcatgatcacaaaaaatggaaaacttatttataccaatcttacagaagaagataagcaggcggcccggtcagtggccggggacgccattgatacggcaaagacactgacagccagcaggcatgaggtgtctgtgatcaagaacactttttatcatggcgagaaagtattctgtattacggctgtgcaccgtcagcagacagaccagggggttgtgaattatctcaaaaattatatcctgagatacctgctcgggattctggcattttttgtgatcctgacggtatttgtaaatggaatcacatcctggtggatatcaagaagtatcttgaaaccgctgcatcagttgagcatgggtacaaaagaaatccgggaagggaatctggataccagaatggaatatcagaagaaagatgagtttggggaagtatgcagggattttgatgagatgcgtgcttatttgaaagagtccgtagaccagcgcctgagagacgaaaagcgcagacgttctctcattaccggcatttcccacgacttaaggaccccgcttacctccatcagcggttatctggacgggctgatggatgggattgcagataccccggaaaaaagaagccgctatctgcaggcgatcaagatccggacagggaatcttgtcagccttgtggacagtctttcggaatacagcaggttggacaatggattccggtaccggatggagaaagcggactttaaggaatttgtggagcgatacctggaaacataccggccagatgcagagcagaatcatgtggaaattgaatttttatgtgggaaagagacttatccggttcagattgaccgggaggaatttaaacgggtgtttgacaatctatttgcaaacgcggtcaaataccgcacgttagaaaaatcaaatattcagatatctctcaagcgcacaatggaaagcacggatatcgaactggtatttcaagatgacgggcccggagtgccgcttgagagtttggaacagatatttgacagtttttaccgggtggatgatgcaagaacacagtctgaaaaaggaagcggcatcgggctggccgtggtcaaagagatcattcttggacatggcggctctgtgcgggctgaaaacagggaaggactggcaatgatcatccatctgccaatagccggggaggatatagatggagaaaatactgatcgtagaagatgatgaattgatcgcggagctggagcgggattatctggaagccaatgggtttgaaacagatatcgcttttgacgggctggaaggagaaaaaaaggcaaaagcaggcgactatgatgccattttgctggatgtgatgcttccgggaaaaacaggctttgaggtatgccgggaactgagacggactatgcatctgcccattattatggtgacggcaaagaaagaagatatcgataaaatccgcgggctgggacttggcgcagacgattatctggcaaagcccttcagcccggcagaactggtggccagagtaaaatcccatatccatatccacagcctgcttctggagtccagggaggaaaaagcagagaacgagattacttatcagaaccttaccattctgccaaaatccagaatggtgtatctggataacaaagagattgttctggtgaataaagagtttgaacttctgcttttcatggcagagaatccaaatatcgttttttcaaaagacacactctttgaccggatatggggaatggattctataggcgatgtggcgacagtaacggtgcatatcaaccgcctgcgggataaactgggacacaattctaaaaagacacagtttattgaaacggtctggggagccggataccgtttcaggattgccggatgaattgaattatattaatctacaattcaagaaactacttgcggcacacgattttcccgatgtgcatatccatgaccttcgacaccccaatgcttcgctgccaataaatatgggtgttccggccaaggttatatccgagcatctcggacactgtgacactagaaccacggagaatatttatgcccacatcttcaacgagacacttgcccagacctccgatgccattagtcaggcacttgcttcaaatgaataggcacacagcaccatgcgccataaacacagaaaatgccaagctttccgcacgggtacagattgacggaaaacttggtgtttatttggtgtttgaatgtgtaaaacgagctgatacaaggcgatacgatatacagtttgcagtgctacgaaaccgcatgaaatgagcgttttttaacgatacgaaacaatgccaatgagcagaattacggcttggtaaaagaaggtagatataaagtgctgacacaggataaaaaactatagatatgcatataagataagtatttgttatagataaagatacatgctaagaaaaaagcaaagatagagggtgtattgccacaggcatcagaacaacgaaggaaaaggggagaaagaggaatatgaggatcgcagtagtcgatgattcaaaagaagatgcgggtcttatcgctgcatatttggaacaatacgaaagagaaaacaatcaaaaatttcatataaaagtatattatgccagttttgattttctggaagaataccacggggattacgacgttatttttttagacattgaaatgcctggcagcaatggattggaagtggcgcgggaaatacgggaaagggatcaggctgttggtatcatattcatcaccagtctggcccagtatgccattgaaggatatgcggtccaggcgattgatttcatggtaaagccagtaggttactataatttttccatgaaacttgaaaaagcattccgttttatagaaacccataaagagcaggatgtgctgatcagcaacaaagatggcattatccgaatagcggcttcggatatcctttacatagagaaagaccgggattatcttctgttttatacaaggcacgggtgttttaaaaccagagggagcatgaaggaaattaaggataaactgcaatccctgccctttgccgagtgcagctccggctgcttaataaacctaaactatgtcaggcgggtaggaaaagacagtgtgatactgacttcagatcaggaactgccactttccagacggttaaaaaaactgtttgcacaggattatattcgctttatgggaggattataagatgatatatgaattttttgaaaatctatggatccaatttccttttcaactgcttgtttcagaaggaatctttttaatcagtgtaccaaaacggaaaaactttgtgccaaggctcctgctttgtctgtttttgcaaattgcgttgggggctctgtgggagcctttacttacatacctgttttctcaatctttattccaatacgtcctgttgtatttaggatacgcatttttaacggtaattccacttttaggaagttttgatatgggaatccaggagctgatttttattttggctggcggatatgctgcagaacatatgacctttgcactcagcaggattgtattgtacctggtacatggcagttatgaactgtatggcagtctgctgcatctgctgattacccggtatcttatatatgtgattggagcagcagcgatttatctgtttatcatccgaacgaaaaataaggaaaacagactgagagacagtgacttgcggatcgcagttcttgggtttatcatcatggtctttgccattggattcagcgtttactggtcttatccaaaggagtattccggtacccagatcggagaggtgatctgtccggcatatagctttttatgttgcgcacttgtacttttcatggagtattacgtgcttcgggaaaacagcatgcggcatgaacaggagatgatggagcagcttctacaaatatcaactgcacagcagaaaagctcaaaagaagccattgacatcatcaatatgaaatgccatgacctaaaacaccagatgaaagcattggccaggatggaggacgatcattccagaaccgagtatctgcaggaaatcaggagtgcagtatccatttatgatgctgcctaccataccggctgcagtgcgctggattacgtgctccgggaaaagacgttgatattcaatgaacgaaggattgagttcagttgtatggctgaaggggaaatgatttcctatatgtctgccgccgatgtatatgctctctttggaaatgcattggataatgcactggagtgtgtgatgaaagaaaaagagggggaacgtatcatcagttttcagatcaggcatcacaatgatatgatattgatccatctggaaaaccggtgcagcagtcagttgaagtttgaaaatggcatgcctgtcacagataaaacagacaaaacaaagcacggttttggcgtaaaaagcatggtatacattgtagataaatatcatggcgatattgtaatgtctgtgcgggatgggaagttcaatctggatattctgctcccatcattggcggaagaatagcttaactttaccgattaccgtataaaaacgaccgattttcgcatttgcatttatagaatcccttccttgctatactgattacagcagaaaaacaaatacatttctaaaacaagggaggaagaaaaaatgctgcaatttttaattgaatggctgacccctgtatttacaaacatgggtgtgagcgaaacagatgtagagcggtatgtccacacactgggcggctatatttacgcgatcgtgggcctgtttgttgtcgctgtggccgttatgatcgccgctcactgggtggtgaaaaagggaaccagacatgtggtacggtggggagcaggtatctcctggatactgatcgtaacggtattggccaatatcatttcctttggccccatgtataacaatctggcaccgattctcaacgggcgggggtctgtctcagaggaatctctgaaggcgtccagggatatcatcaaagaaaccggagaggaaggaatggcgttggtgaaaaacgacggaacccttccactggaggcagactccaatatcaatgtattcggatgggcgtccaccaatcccatctacggcggaactggttccggatccgcagataattcgggaaatatagatattctgacatcccttacagatgcgggattcaaggtaaatgagagcattgttgatatgtatcgggagtacagcccaaccaggaatctgggcggcaatgtggtcagtgtaacctttacagactggtcattaccggaacctacattggattactataccgatgaactaatggaggaagcacatgatttttcggatacggctatgatcgtactggcaagatcaggcggtgaaggacaggatgttcctcttgacatgaaagcggtcattgacggcacatacgatatccgtgatgaggttgccaatggaaatgatgagtacaactattttgcctgcaactatgacaataatggggattatgatgatttcgacgaaggggaaagttatctggagctttctaattcagaggaagcgatgatcgagaaggtatgctccgagtttgacaatgttgtggttgtgatcaatgcaaacaacccgatggaacttggctgggtagaagaatatgaaagtatcggatcggttatccttgcacccggcaccggcgcaaccggtatggcagcattgggagaaatcttaaatggttctgtgaatccctcaggaagaactgtggacacctatgtttatgatctgacagatacgccgacatatcataattacggaaactttgtctttaacaatgtggaggatctgaaagctgagcttacagaggccgacgtggcataccagggagcaatgccctttgtaaactatgtagaggacatctatgtgggctataaattctatgaaactgccgcagaagaaaacctgatcaattacgaggaaaaagtgcagtatccatttgggtatgggttaagctatacgacctttacacaggaaatacagaaatttacagacaatggagaaaccatttctgtagatgttgcagtcacaaataccggggacacagcaggaaaagatgtggtagagctttattatacaccgccttataccaatggtgggattgagaaagcttctgtaaacttaattgaattcgggaaaacaaaagttttagagccgggagcttcagaagtgatttcctttgagattgccaaggaggatatggcagcatatgactccagagggatcaaaacagaaaatggcggttacatactggaagccggggattaccgcctgtcagtcagatcggattcccatacggtattggatgaagaaaccttccatgtggatgcagatatcaattatggttcagaaggacgcagatccgacgatgccacagccgtgaaccagttccaggactattctgccggaacagtcacctatctgtcacgggcagatggatttgctaactatgatactgcgacggctgcgccttcccaggaaatgtatgtgatggatgaggagacaaaggcttttgttgcagagaaatccgtggctcactatgactccaccaaatacgatgatccggaggatgagatgcctgtgacagaggcggacaacggagtaacagcagcggacttaacaggaaaagaatatgacgacccattgtggaacgatctgttagaccagctgtccgtagatgacatgatcaatatggtaaaccttggcggtttccagacagttgccgtggattccatcgataaagtgggcaccctggattccgatggcacatccgggttaaatgactggtatatcggtgtatatggtacggcgtactccacagagcttctcattgcccagacgtggaataaggagcttgcttaccggatcggggaggcggaaggaaatgaatatgcagactgccgtattttcggcgcttacgcaccggccatgaacatccaccgcagcgcctttaccggacggaacttcgagtattattccgaagacggagtgctgtcaggacacatagcgtcaaacactgtaaacggaatggcatcaaaaggagtatatgcttatatcaaacattttgtcatgaatgagcaggaaaccaaccgttgtagtttgctcctcacgtattccgatgaacaggcgatccgggaaatttatctgaagccttttgaaatctgcgtgaaaaactttgagggtaaatcaatggcggtgatgtcctcctttaactttatcggtgacaggtggacaggagccaatgcaaatttgttgaataatgtacttcgggatgaatggggataccggggaatggtgctttctgactggaacggttcctacggttatcagaatacagacgatgctgtccgcaatggaaatgatgccatgcttggtttcttcgccgcagagtcaaaccagattacaaacacctcgccaaccatggtgctggccatgcggaaagcggccaaaaatatactctataccgttgtcaacagcgggaattacacaatcccggaccccaatgcagataagatgcccaatatgacgaaactgttcattggaattgatactgccgtggcggtggcagcacttggcattatggccattgttcttgcccgttacttgaaaaagagaaaaaaagttaccattgaagtagtttcaaagactgaggagtaacgtgcagatggatttgggctttccggcagactgggaagcccatttcattattcctccgccttgcaggctgaaaatttatcctgtgtgaaacattcaggtatttagtgaggcttataccaggagagaatatatcgtgatggatgcaaaatctcttgtttctatgctggctttggtacatactcccggtctgaaacttgacattcatggagaaaaggcgggaaacgtggtaaatatactgaaacaagaaggcttttgtgaggtgcattaaaaaattcatgagcatctggaattattgttttatttataattccaggtgctttattttatcataggaaattcctctggaattccctatgataaaataaagccctccgggcaggatgcacacaatgtgcaaaggaaggctgctacgcagctgcacatcggcgcacaaagtagccaagcccctcaagattgagaggacggggagttgaagtgggctagcccactttgtaccattataattcaatagtaaattactattgaaaacaattaattataagcatttgctatctatattagctgatgctatgataaaagcagttaagaaacacgaaagaatcggtttagaaattgtttatctttttgttagcggcatgttatccgtgggagttacagtaataccagattaaggaaaggaaataaaaaaatgaagaaaaggatatacccattcgggcatcccgtaatgcatgccctgcggacagattttcagctaaagctgaaaaataaggtatatatggctttcatgatgtcattgattctgggtacggtcgccggctgtggacaaaatacaggaacagtggaatctaatgtacaggcaggaacagttaaaggagaaggcagtatatcggaaaaaatagaaccgggagaggaaattacggaactgaaagaagggctgtcggtagtccggtatgaaggggacgatggattcggcggttttctggaacagggtggagccatatcagatgaaggagttgtggagtatctgagcagtcagttaacttccaatataccggacctgttatttggagggaaccccttcggatgcagcacgctgtctgtgaaaaatacacaaggaggcaatctgttcggaagaaactttgactggaatgcctgtaatgcgctgattatcagttccaaaccggacaatggctacgcatctgtttcaactgtcaacatggacttcattcaggcaggggggcttgatatttctaaactgccggatatggcacaggcgattattggattgtacgcaccgctggacggtatgaatgaaagaggattcgcagtgtctgtcaatatgattgaagattccgacaccattgaacaggataccgaaaaaccggatcttacaaccacaactgccatccgcctgctccttaaccaggcagcagatgtagaggaagcactgggtcttctttcacagtatgactttcacgcttctatgggcatgatgatccatctggccctgtccgatgcagaagggaacagtgtcgtggtggaatatgtaaataatgagatggttgtgacagagacaccggtagttacaaacttttatctgtcagagggagaaaagtacggaatcggaacttcccagtcccatacgagatatgacatcctaaacaatgcgctgaaggaacaggatactatgacggaaacggacataagggatgcgctggacagcgtgagcaaagacaacttcggcgagtttgagtctacagaatggagcatcgtcatgaatcaagagacaaaggaactgacttactatcacagagaaaattataagcagggatataccatttctgtcagataagaagcaaggaggagagcaatgaattatttcaagacgctggcagcgctatatcgtttgaagagacaagcaaagcttaaccataagcagatgcgcaccctgcaggataaaaaattgagaaagcttctgcattacgcatgggaaaactccgcctactacagaagaacttttacggcggcaggaattacagaggaacagttggatgagcttcccctttcctgttttccaactatagataaaaaaggttttctggaatactttgatgagttagtggttccgaaggatatctgccaaagggaactgcgtgaatttgatgcggcaggttcatccgaccgtaagccatacaaaggaaaataccatgtggtacattcctccgggagtaccgggaacccggggtattttgtttatgatgaagcagcatggaatcacatgcttcttggcatgatccgggccgcactctgggatatgtcgatgccccacatcctgtccctgctggcaaaacggccccggatcgtatatattgcggccacagacggacgatatgggggtgcaatggcagtgggtgacggaatcgacggagtaggtgccagccagatgtatctggatattaagacaccccttgatgagtggatccggcagatcaaagaatttaaaccgaatattatcatcggatacccctctgccatcaaaatccttgcagaactggtagaaaagggaagtgtggaagtacatgctgtgcgggtgatttcctgtggggagcctctgggggcaagcctaagaaactacctggaaagaagctttcggacaaaggtggtcaatttctatggcgcaagtgagtccctgacgttaggggtggagatggatccggaggaaggcatgcttctatttgacgatatgaattttatcgaagtagagagcggcgtgatgtatctgacctgtctgtataattttgcacaaccactcatccgttaccgtatttctgacagtctggtgctaaaagcagcagatgagagcagcccctatccatttaccagggccattgggcttttaggaagaaacgaagatatcctctggtttgaagacggatccggaaacaaagagtttctgcatcccctggccatcgagggattctgtatccaagggcttctggattaccagttccggcagattgggaaagatgcctttgaaatgtatgcagagacttctgtatctgcctccagagaaaaaataaaagcggaaatgctgtatcagatgaaaaagatccttgcggaaaagaagctggattatgtacagttctatgtgatttttgtagatgaaatccttccggacccggggacgggcaaaaaaccattgataatttccgcgggcagcgagctgggcggatatgaggaaatgtctatccggcgactgccgcgagagtcaaatctcgcgttgcctaaaacgagagataggacacagaaaggggcggacgcacagtatgaaaaacgtgttattgcagggtaggcaggtgagtaaagtctttgtgcagggccaggtaaaaaataaggtactggacatggtggatgtggatatctatgaacaggactttaccatcatcatgggttcctccggcgccggaaaatctacacttttatatgccttaagcggaatggatgcggttacggacggcgaagtgtcatacaaaggaaaagagatcagccgattaaaagaaaagcagatggcaaagcttcgtgcgcaggaattcggatttgtattccagcagacccatctggtgagcaatctcacactttttgaaaatgtagcagtcgcaggcttcgtaagtaaaaaaggcagtacgggggagatctgtgagcgggcaaggaccctcctgatgcagatgggcgttgaaaaagcagaggaccgtcttccctcccaggtgtcaggcggcgaggcacagcgtgccgccattgcaagagccatgattggaaatccaggactcctctttgccgatgaacccaccggcgcattgaacaaatcccataccaatgaggtgttaagccttctgacttctttaaatcattccggacagagcatcctgatggtgacccacgacatcagggctgcccttagaggaaaccggatcctttatctggaggacggtagagtcctggatgagctgaccatgcccaaatacaagatggctgaggaaagacagagggaagacagattaacagaatggctttccgatttacaatggtagcaggaggatacaacatggaaaatacaatcctatgcagtgccggattccgaaagcataaagcaacccttatggggattgcagtccttttgttcctggtctccctgtccttgaccacagtcctcacggtatatcttagcggcggacaccatatcgagcaggagatacagcgggcggggtttggaaaccttaccgcctgggtttcgggtgtgccggatctggaggcgctgaccgacagcattgagatgcaggatggcattgaaaggacagaagtacagagtcttatcttttccgattatgaggcaaatggcgtggagtcagacagcgaagggcagctcatcccctgggagtccgggatagaaacttaccatttttttctggatgagctgaatggttatagggacgcgccggaggaaatcgttccgggaacggtctatgtatctccatctatggtctctgtcatggatctgaaaattggtgacaccataacattttcagtggcaagaaaccaaatgaacaaaagttttgcggttgcgggatattatgaggacccgttcatgggcagttccatgattggaatgaagggatttctggtatcagaagcggattacggggagattcaaaagatgatagaagatactggaatggacagcctggccaaaagtggcgctatgatccatatttatacgggtaataaccagctccatgtcacccagatcaatcagacgctcaatgaaaatacacccatttcccaatacacagagtttatacacagtgcagaggcaatccggaactttatgggaatcctgcaaaatgctttctgtgggctgctggcagcatttgtcctggttcttctggcagcggtcctggtggttttagggaacagcatttccggcgtgatggaacaggaatataaaaatttagggatactaaaaaccatggggcttaccgcagaccggctgatccggctgcagcttgtacaatataccacagctatgggcagcgggatcctgcttggcatactggcggcatttcccgccgtaagtatggttggaaagctgacgctgacaaccacgggagtccttctcccggcgaatataccgatcctgccttgccttatggcttttacagtgattctgttactgctgctgggatttgctgtcctaaatttaaggaaaatcatctttgtcacacctatgagggcaatccggggtgaaaccgcagaacaaaaactgcggccgcgaaaagcaggttcaatgaaagccgaagggcttcccttaagacttgcaatgcgtcagcttcagactggaaaaaagcggtacgtaagcgcctgcctgattgccgtcctgctggtattcttcgcctcgctgacaggtaggacaaatgcatggcttgggccggagggcaaagggatgatggatgcgtttaatcctgcggatctggatatgggcgtgcaggctctgggagagctggatccagaggtgatggaggacatggtccgctcttacacagatatcaccgacagctatctgcttgccatgccaagtgtatccgtaaatggaaccaatttcacggcaaatgtgatcacagagcctaagcggttccatatcagccagggagagaccagtaggagggatgatgaggtggtgctgacagaaaccgccgcttccgatctgggggtgtccattggagatacggtgatgatccgcggggatacggggagcaggtcctttacagtttccggaatctaccactgcgccaatgacatgggtgccaatattgggatgaaccgggaagggtatcttaccatcggaaaggatgacccaaacctatggtgtcaccattatttcctcgcagacccatcgcagaaaacggcaattacagagagcctgcaaggggcttttggaggggatgtacatgtgcatgaaaactcctggccgggtcttttgggaattatccaagccatgcaaggtctgctggtatttatgtatgggatgatcgcagtattcatattgatcgtaacaatcatgactggaagcaagattctcgtggcggagcagaaggacatgggaatttataaagctattggatgttccaccagaatgctgcgcctgtcattttccctgcggtttggaattgtagcagtgataggcgcggcagtggggaccgtactggcatccattttcacagatcctttggtttcctctgtcatgcggcttgcaggaatcagtaactttgcatcccatccagatatttcaagtatagtcctgccaggtttgagtgtcatcctgctgtttttcggattttcttatctggcagccggacgtattaaaaagtcggatttggcagtattgacggcagagtaaagaattattttgcgtacattgcaaaataattcgctaccgcttgacttggtcaagcgggttccttaaacaacaataagcagagcgcaaatgcgcagaaaggaaagaatgtgaagaacaaattcgtaaaaaaagtaatgggagcagcaatgttaattacgttgtctgcagcacttctggctggctgcggccaggaggagggacagggcagtgaaagtatcggacaaagcaattcagatacacagtccggttccaatgcagaaaatgcaggaacgggggcagatacacaaggggaggaagaaagtggcaattcagttgacagccagaccacaagtggagtaacggagctggaagtgaggttcggagatgacggagcgccgtttatgatgaaactggaggataacgaaacagcgtcagccattgcacgctatgtgggaacctccgactggagacttcccatttatgagagagatgaggatgcggactatgacgtgatgcagtattatgatgtatccagcagatatgacatcccctccaatccggaaacggttacttccgaaaaagcgggagatgtctattattcagacccaaaccgtatcatactcttttaccatgatgcagagattacgggagaatataccaaaataggcacctttgatgcgacgcaggactttgtgactgcagtagaagaaaatcctgtgttagaaggatggggaaataagatcgtacagatcgcacagccatagtaacagtgataaagtaatgcaccacatgtattgaaataattcaaaataaaaggagatattgaaatgaaagaaatcagacaggagtttttaacaggagaacgtgcactttttaaaggagagaatttaaaaatatacgataccatatttgcagatggggaatcaccgctgaaggaaagtcatgatattgaacttttcggcagcatgtttaaatggaaatacccactgtggtacagtaagaatattactgcccaggactgcacctggtttgaaatggggcgtgcaggggtatggtatacggacaatattacagtgaaaaatgcagtcattgaggcacctaagaatttccgccggtgtcatggcgtgacacttcagaatgtaacttttccaaatgcggcagaaacactttggaattgtgatgaagttattatgaagcaggtaacggccaaaggtgattactttgcaatgaacagcagtaacatgaagcttcaggattttcaactagtgggaaattattcctttgatggagtgaaaaatatggaaatccataatgccagaatgctctccaaagacgctttctggaacagtgaaaacgtgaccgtatatgattcctttatttccggagaatatctcggctggaatgcaaaaaacctgacactgatcaactgcaccattgagagtctgcagggaatgtgttatatcgacaatcttgtcatgaagaactgccggcttttgaataccacgcttgcattcgagtattctaccgtagatgtagaaattgacggcaagattgatagtgtcatgaatccgtctgcaggcagcatccgggcagattacatcaaggaactgatcatagaaaaagataaagtggacccagataagacagtcatctcctgcaaaacggaccaaggtttagaaaaaatggcggtttagcaaaaggaaaggaaggaacagatgggtattttcatgatgaaagggattctgatcggacttctttttggtatgccggccggagcggttggggcaatgacagcacaaaggaccttgaattatggcatgaaagcaggcctgttaacgggattggggtcctctgttgcggactgcctgtacgcctgtgtcggtgcctgcgggcttaccctgatttctgattttcttcttggacaccaaagtgtgatcaacctgatcggaggatgcctgattctgggtatggggatcggtatgctgacgaagaaaaacgccatggcgcaaaaaatgccggactctgctgcaggtatccggatgttcctttcttcctttgcagtggggattacaaatccggcagccattcttacgtttctgtttgcattttcctggtttggcatacagggacagacaaaacttgcagacgggatcggattggtgtgcggcgtatttatcgggacctatatctggtgggggacactttccggtattgtcaccctgttacagaaaaaagcgaagaaagatcatctcgctgctatgaatcggatattcggaggcattttgattcttttcgggactgtagtgcttgttcggaattttcttcattagagataagaattttacagatttaataatgaaaagagtaaggggaaaattacatgaaaaaaagattttgcagtttttggctggcagtttttcttgtaatgatgctgtctgcctgtggaggtaaggcgggctatagtgataccgccaggcagcctgcagctgattcgcaggaggaaataaaggaagccgcaggaccggcagataagggtatcaaagatgcaccgcaagaaaaccctgataatagtttggcagaggataggaaagccgtgcaggaaacggaggatgacaaggaggaagcagatacaccgatgcagggaatggcagttaaaatagacgggcagaagtttcaggtaaccttatatgacaatgaaaccgtacatgcgcttaaaaagcagcttcccatgacacttaagatggaggaactgaacggaaatgaaaaattttattatctggacgagggacttccaacaaatgccgaaaatgtgggcagcatccagacgggagatcttatgctttttggttccgactgtcttgttcttttctttgaggattttaacacctcttacagctataccaggatcggccatgtggaagatgccagaagttttgcaaatgctcttaagagcggcacggtagaagtgacttttgagatagtagaataggagaagacagcatgcgtttccaatttgatcaaaaaatagaccgcaggaatacgggatccatgaaatgggatgtgccggcaaatgaactgcccatgtgggtggcggacatggactttcagacagcgccggaaattatagaaagcattatggagcgggccacacagggagtatttgggtataccgtcgtgacagatgaatggtatcgggcttaccaggattggtggagcagtcggcaccattttgagatagacagggaatggctgattttctgtactggtgtcgtacctgccatttccagtattgtccggaaggttaccacagtcggggagaatgttgtagtaatgacaccggtatataatatattttttaattccattctgaacaatggaagaaatgttttggaaagccgtcttaagtacgatggagacgcatatcagatagattttgaagatttggaagagaagctttccaatcctcagacaacgcttctgattttgtgcaacccgcacaacccggttggaaagatatgggataaggaaacgcttaaacgggttggtgaattatgcagtaagcatcacgtacgggtcctttctgatgaaatccattgtgaccttacaaagccgggatgtgaatacaccccatttgcttcggtatccgaaacctgccgggataacagcattacctgtgtagcgccaacgaaagcctttaatctggcgggaatacagactgctgcagtgattgttccggacaaaaatccgagaaataaggtaacccgggggttgaataccgatgaagtggcagagccgaatgtgtttgccgccatcgcgcccattgctgcattttctgccggaggggagtggctggatgccctgcgggtatatttgtgggagaacagaacatttgctgaggaatatatcaaaagggagatacaaggtatatcaccggtttctgctgacgctacgtatctgctttggcttgactgtagaaatgtcatcggaagttccacagaattatgcaattttatccgccgctacagcggcctgtacctttctgatggaaatgaataccgaaacggcgagggatttctgcgtatgaatctggcctgtcccagaaagcaggtggaagatggtctggaaagactgaaaaaaagcgtgtcagcgtatgaaaaatgggtgtgtgaacaatgctgaccagaaaggttgttaggtgctttgaaaatcgtattaggatgcagacaatttgttttgtatttcgtttatattgttcttttttcattggttacgggggtgttgattaactgtttttaaatggaagaaatgaccttgttaaacacgccctagtaaaatcaggaagattttttaatgaagaagaaaattgtaaaaagggtagtgattgctttgctgataatcctcgcactactggcaatggcggcgggattatttctgctattctggccctctctggggaagaatccaacaaaagaacagcaggcagaatatcaaaaacggtcagatgcattttatgaaggtgtttttcataccccggaaaagtttgaactgattgtagagacggatcataaaagcaacaaaaatacagaactgacaccagaaggaaagataccggtaaataaaatcacagaactgcctaaggcagagatcgatgatttaactattacatggttcggtcattccacatcactgctgcagattcatggaatgactgtatttattgatccagtattaagcgaatattcatctccggtagggtttatcggagcaaagcgcatggctgaggtgccaatgtctgcggaagatataccagaaattgatgtacttttgatttcacatgaccattatgaccatttagattaccaaactataaaagatattgataagaaagtaaaaaattactgtgttccacttggagtggagaatcatctggagagatggggcgttgatccagagaagattcacacaatgacatggtgggaagacgcagaaattggcggccttacgatatcctccacgccgggccagcattattccggaaggctcccctgggggaataaccaaacattgtggagcggttactttatacaagatgaatatcataaagtttattatacaggagataccggatacggcgaattttttaaggacatcagaagcaggtatggggagccggaattagtgctttcagaagacggtcagtatgatccggaatggccctactgccacatgagtccggaggaggtcttaaaagctgcggaagatataggaacacaatggctcatcccggttcactgggctgggtttgtgctttccagacatgcctgggatgctccggcagagcggatcaccacattagcggcagattcagagattgctgtgtcaacgccccggattggagaaacaataaactttaacgacataaataattatcaagagaaatggtggcaagaggtagaatgacaagtagtgtttcctacaagacaggacacagggcagaatattttcaaagcctttgaatatgatgttgaggtctatttgactccaacatcatttattttgacttttattgttactcatgcttctattatggcaagatctttttgggtaaagagaggctacaggtttgtcaaggagcagcaggtagagacaaggagttttcttgcaaatattgtgatggacaaagaaagtacttgcgagaataatagttgacgcatcaactaattctgcgatataattttgcttaggattaagggaggttatatttaggatagcaagcgggaatcctcggttattcaattgccgagatgaaagcgtcaaaatgtgcatttctgcacgaaacaatagtggctgtatccagcctataaaaaaagaaaaaaagaacaaacattcgacaatatattgctttgcttattgaaatagtgtatactatatgcatgaaagaaaatctgatacatgcaagaacctgcgtatataatatcaactaccatgtggtgtggccggtaaagtaccgcaggaagatcatcacagaagacatggagcagacgatgaaaaaatgggctgtggagaccgctgatgagaagggcttcacagtccatttatttgaagctggagaaagagaccatatccattgttttgtttctgcaccacctaagatctcgatctcatatattgtaaagatgctgaagggtattattggaagatatactctccaaaaatatccggaactccgtaaatatttatggaagggagaattgtgggatcattcctattatgtggaaacaataggaaacgtttcggaggaaaacatccgcagatctattgaaaaacaaacgaagtcatactgacaggaaaggggaatgcatatgctcttgtcgagaagagaagtatttttaccaacagaagaacagaagatgattttgggacatatgggatatgcagcatttaaactctggaatgtggcaaattatgaaaaaaggaattacaaagagattggaatgaccagatatccgaactggtatgatcagaagaaacggttaaaagaaaatttcttttataaaaatcttccatcacagacggcacaggatgtgctccaacaattggaagaggcgtggaaaagcttttttgtattgctgaggagcagaggggtggagaatccgagaccgccgcgtttccgaaaagagaagatggatattacttttttgaaagatgcaatccggcaggaagaaggaaagatccggctgaccattccaaaacagttaaaaacttatctgaagagccagggtgtggatgctgattatctttatctgaaaacaaagcggttttcagacattcatatcaaagagattcagatcaagtttgatgaaaaaagatatacagcaatagcagtatatgaagagacagatgttccgatgcaggaagataatggacattatctggggatcgacatgggactgaaaaatatgctggcctgctatgacagtgcagggaagacatttctgttaaacggattattgaatactacccattattttgataaagagatcgccagatatcaggggatcagtgaccgtcagcagtcatactgtgggatcaagtacccgaaaaaaacgaaaaaggtacgttccctatatcgaaagaagaaaaataaagttactgatcttattcataaaacaaccagatatgtggctgagtattgtcaggcagagcatatcacaacggttgtaattggagatatgaaggggatacgtaagggaaaggatcttggaaggatcaatcagcagcttcattcctttccgtatgaaaagatcctccagaaactggagtataagctgaaacggtacgggataaggatgatccgtcagaaggaaaattacagcagtcagtgcagtccgaaaagtgataaagttggaaaagcgtttgcacaaagtcagaatcgaaaatatcggggattatatatagatgagccggatatctataatgcagactgcgtgggggcatataatatcctgcgtctgtatctgcaaaaaaataaacttccgtttccggaagcggccggactgaactgtccgcagaaagtatttgtgtaagtccgaaaggactagcaatattgggcgcatggactgcccgttatggtagcaccgaaggtgcggcatatagatgctcggtaattcaattgctgagtagttcacatgaaatacaagcgttacatttttccaatattaatgggctttactatgagtaatattatgtcaattagcagtacagggaaaatcttgtttcctcaaattgttgtgacgatgcttctacaagctactgttgccagtgtagcatctttattgtttcctgccggagtggcaggtgctaagttggcaaataaattttttccgaatagtcattatcctctatttttgatactatcatcaattgtaccggcgatttattttaccacagttatgtctataagcgggttgttgaaaatgaagggttattcagatgagttttggtatatttatttttattctttgccattaaacataatatatggatatatagttagcattatttggaatattattttggataaaactattgagaaggtagagagaaaaagtgaaagatagcattggaaaaattattactactttatcgagaaatatacaacaggaattgaaagaagttgttgaaccttttggaatatcagtaggagaagaaccatattttgtagaattggctcatgaggatggaattacacaggaagaattaacgaatcgaatcagcgtcgacaaagctgcaacagcaaggatggtaaaagcccttgagggaaagggacttttgataagagtgattgactcggatgatagaagaaataaaaggctatatctaacagataaagcacaagtattatatgaatcattggtagaatcactgcaaaagtataatgaaaagcttactcaaagttggtcgaatgaagagtatcatttggttcttgactgtttacaaaggttacagtcagattatgaaaatagaaaagataggaacaaatcataggaacaaaactaaatgctacaaacatcgaacgcacattcttatcttaccctcgatgaacggagcactcctttgaagaacttaagaccgccagcctggatgtggtcggatggcttactgcatatagtacagatattgattatcctctgttgcaaggagaaaaataacaacaaacacttaaatatggatgccagagggaattagtctctgggaggaagtatctttctggattaccaggcgcaaaaggatttcagtgatttcaacaacattatttacgggcatcatatggaaaatcacgggatgtttgaggatgtggaattattcacggagaaagagtattttgatttacactggtatggaagcctgtttcatgggcacaaaatcagttgcgcttatcttctattacaagtacaatataggtatggaatataaaatctattatgaattattctggttctataggtttacacaaacatgcaacaagcgatgacatcaactatgttatttctggtacagggtgtgctgtttgtgacggtaaagaagaatcccttatagctggagcttgtcacatatgtaaaaaaggttctgaacacagtattaaaaatacaggtgatgaggatttggttttattaacgattgttgtagaaagataacatctagtttatgctgctgataaatttcaatttaagaggaatttttatgataagattaagaccatataaggcttgcgacgcacaaaccatcacaaaatggataatagatgaatatgcgtttcgccaatggagtgcagaccgttatgagaaatatcctattacttctgatgatatgaatttatattatgacagagacaggaataatgaacgtatttggggtatgacagcctttgatgatacaggtatcataggacattttactatgcgttttccaaatgataacagctttgatgaaattcgattaggatttgtaatcgttgataataaaagacgtgggaaaggatatggaaaggaaatgctttctttcgctatccaatacgcatttgattttgttaaagtaaaaaaaatatcattaggagtttttgaaaataatataaccgctataaaatgctatgagtcttgtggatttaaaaaagttaaattagaaaatacagaaaggtattactgtatgggtgaagtgtggaattgcattgaaatggaactggtgaaataaatcccagttttccgaatgataatttgaaatttaggaagggatttggatggagtttacattagaaaagtggaaagccgaagactattttgattttttcaatgcttctgctgatgatgaattacgggcaaatatgagcgacacttttccggcgacgcttgatgaatgcaaacaggttgtccgtgttttttcacagagtacagatactacggaatatattcgggcaattaaaattgacaatcaggctgcaggctgcatagcggcatttttggaaactgatatgtacaggaaaaatgcagaaatagcctattggttgaagaatgatcataggggtaagggtgtaatgccacaagtaattgaaatatttacgcgggatttgtttttgctctttgatttgcaccggatttacgcaaggccttttgaacagaacagagcttctgtgagagctttagaaaaggcaggattttcttatgagggaacgttaaaacaaaacgtttataaaaatggcatgtttatcaattcggttgtttactctataataaagtcataaacagcttccagtctctctcttaagactgattgagagtacgataagtattacattatttattcgtggggagtaataatagtttctttcatgagtcgcatctaagaggacattaaaacaatggagacagagagaatgaatactaaggcattacttgtagtagatgtgcaggaaaatatattggaagatatgaaaaaggactgctaaaacgcatcaatcaacgcattgaaaaagccgtagaggataacgaatttataatatatattgaaaatattaagacacttaaggacaaagagaaaacaagtccgtttgcagagaatctgtatattgcatcatcttatgttttcagtaaaaagaaatccagtgcattttcaaataacgagcttgtaaaattcatcaaagaaataggggtaactgatattgaaataataggtgtagatggtaacttttgcgtattgttgctagagataaccctgcgccatggtataccgaagatggaatcctcgttataagtatatatgatttcttattaaatgataatagcctggatatgtaatagtttagacagggactgcctcataggcagttcctgtctaaactatttggagccataatatacgaatcggttttggccaaataagccgcaggactgtcatatgggaaaaccgatccactcgcttcacaacccgtattgcacgtcagtctataacgatttgggtcggaaaaaatatatctaacaaatataaaatcaaccatagaccagctaaattatgatatactgtccacataggcaatgagtctggcgtgttttttgcaagcactttttggagaaagttgcaaaacatttttggcgattattgcatctccaaattggcgaaagttgcaaagcctctgctgacccgcattggagtcagcgaataggcattgcagacattattatttaattgttacagcgtgagataaggaaaaggcatatcctcttcgtattcctcatgcgcatgcttcctgaaataccggaaatcatcctcaagttttctataatggacgaattcctgtagataccgtaaatcttcttctgtgcggttgtgatcctctatcagaccggagagatgatcgctcatttcctcatatcgttccagaaggtcttgatagattttagtctgctctttgataactttattgtgcttcgccattgttttctgcctcccgcctgttgattcttggaattgactggttgatactggactctcgcagccggttattcacaccagggaaaaggatcaactccacatgatgcgtcagccgtccaatgagtgccgtcgtcattcgctggtcatacaggacattgacccactgtgagaactccagattggtattcagtatcacggatttctgctcatgtatttcggagagataatcaaagagcagttgtgacccggttctgtcatatggcacatagccaaactcgtcaagaataagtatcccggcgctgttcaatttctttttaaactgtgtcagcgtgcccttggccttgctctctgcgaacaggttgattattcctgcagtccggtaaaaccgaacggggatatcctggttacaggcagctattccaatcagaatggacagcatggtcttcccggttcctgtacctccgtacatgatgacgttctttccggcatggtagaactccagttgcaaaaggctgttcagacttacttcttccgggaaatcgatttcatctgtacggaattcactggcagagtaacggcggggaaatccggcagcattgaggtattttgtccgtctgcgtattgtccggtatttgatttcatttgtcagcagattcagcagatattcctgggcattccccccttccagtgttattgcctgctcggcaaggtttgaagataagcgtaactgcttgcagcatgcggcaatggatctttccagatctctatcagccattggaaacacctcccctcgtcagggcagcatccaggctggtaaggtcgttccgaaacaggacgaccttctgcgatgggattgccgtatccgtttccaacggtggcaataacggtacatctgcataggttcgccggtataggcttttcaggctgtccgggtctgttgcatgaagccggatggcttcctcgaccgttgtcagagcgctgccaaagccgcttcgctctgttaattcagtgaggactttaaggatacggccccgttcggagccctcacagctgtccatatacaactgcatgctgtgtggcatcatatcatagatgccgctgttcttgagggagcgcggctttcgggatatatacttaagatatgggatccagtccatgctctccttatcgtctccataaaggcgtttatggcggacaacttcatgcatgtcctgatccataacagagacctctgcggatgtgatcctgagatttaccgtatcctcacagtatgcaggtgaagcagaatagcggtgctttccggcatccagggtaaaccggccatatttatccgttcggacactcgtatactgagcggtatcaaagggaacagatggcagtgggagcagtcctgccctgtcttccacgaaccgctcgctgatcagacggccgctgtcatcatcgtaatgctcacgttccatatccaggtaacaccggctgagaagatgcttgttctcctctttcagagactgaaagcggggaacagggaccaattcattgcgccgcagatagccgactttattttccacgtttcctttttcccatccggatcctggattcatgaaaacaggcttgatgcggtaatgctcgcaaaagcgctgaaaccgctctgtgacgttccggcctccgcctttgatcaccttggtcacgattgtcctggtgttatcaaaccagatctctgtaggtacgcctccaaggtattcaaacatggctgccattccttccagaaggcactccatgttttcaccatagttgagctgcagataaccgccattgctgtacggaaagcttagcacgaggtatttggcctcatgatgtaatcttccattctcgtaaaaatcagcatatccgaaatcagcctgggcttcacccggatgatgaactaatggaagatagccatctgattttttgatccttagttcctctttgcgctgcttgacgtacaaagccacgagcctgtagctgcagtcaaaatcggctatctcttctttcaggcgtttatagatccgctttgctgtgtgccgctgcttccgtggggcaagcttatcggcttgcagccactcattgatcaggggcttgaagggatcgagttttgactcgtgctccacctctgatgcgggtacgggggatagagtattaaaatcctccatatccacgtattttttgaccgttttccaattaaacccagtctcagatgctatttgggaaatgtttttatcttgctgatagaacatttctctgatacgatgtatctgatccattgtagttgacatctcctttcctccttgtctttattgtttggctacaacaaagataaggttaacggataattgtgatgtctgcaatggatcttttcatggctcatacttgggagctaccagatatcggcgcttcccgttcctgcgagctatgtacgaagctttgcaactttctccaaaatggcgatgcaactttctccatttttgttttgcaactttcggtaattttattttacactaaacagtctggcgctctgccggaaaaatgctttttggcatgggaaggaaacggattgaatggaacaatggatggatcttggcagaatatttaatttggagcaatgggaaactgtgcagaattctctggtggatattacggagatggcgatcatcaccgtagattataaagggcgtcccaaaaccagacatagcgggtgctgtgagttctgccgcaaggtgcgcgaggacgaagaactgagccaatattgtcagaaatgtgatgccagaggcggcctggaggcagtccgcacgaataaaccctatatttataaatgctatttttccataattgatattgcaattcccattattgtaaaagatcaatatattggtgcgattatggccgggcagattcgtgtgtctccggaagataatcagtcatctatggaacagatctatgtagctgcaaataagaaatatgtagaagcaaaaaagcaggaactacttgcagattaccaaaatatacccacactgtcctatgaacgcatctgcgttattgccaggatgctgcattctctctgtaattatatggtgacagagtttatccgaaaagaccagatcattgaaaaatatcaggaagtctgccgaatgaacaatgtgccggatacggtcatttgtaatgcgtcctctttaaacgctgatgaccggaaggtacttccgcctccaaaagaaaccgtgcatgaaaaaaatggactgcttaagcatatggattcttccaatcccatcatcctggatgtatttacctatatttcccagcacaaagatgaggctccctccctggcaaagatggcagaatactgtaatgttagcaccgggtatctgagccggcttttttccaaagaagtgggggaaagttattcgtccttcaactccaggctgaaagttgagtgggctaaggcccttcttgagactacggataaaacaatatatgaaatcagcgaagaactggggttcagcgaagcaggatattttatcaaaatattcaaaaaatatgtaggattaacgcctgccgcttaccggtcttacctgagaatcccctaaaagcatgagttagatcatagaattaccatttttatatagaggtcatcatattacaatataaaactacaattttcagtcaccgccgctcaatggcaaaacctcaaattgctgatacgatagagacagcaaaaggaaagcaaaacaaggaggttttactatgaggaaagcatttatatgtccaacgaaatatgtccagggggaggacgaaattttaaatttaggatattttgttaagacatttggcagttcggctctgctgatcgcccatccggatgatgccaagcgtgtggaggaaaaactggaacagacgaaagcaacatttgacgtaacttttattgaaagcaattttcacggagagtgttcccgccaggagatagaccggctgaaaaaactggcaaaagaaaagaactgcagctgtaccattggtctgggcggaggaaaggccatagatacagcaaaatgtgtggcagagggggaggctcttattattgtacctaccatcgccgccacggacgcacccaccagtcattcggcagtgttgtataccccagaaggagcctttgacgattatgcttatttcaaacaaagtcccagcgtaatcctcatcgacaccaccgtcattgccaatgctcctgtacggttccttgtatctggaatgggtgatgcactctccacctattttgaggcgcgggccaatacccagtcctttgcaaatgtaaatgcaggacttccctgcggtgcaagagaaggaaaatgtcctaaggcaaaaggcacaggagcggcatttgccatggcaagcctgtgttatgaaaatctgctctctgaaggtgtgaaggcaaagaccgcatgtgaaaaccatgttgtcactccggcgctggagaccattgtggaaaccaatatcctgctctccggcattggttttgagagtggcggattggcggctgcccatgcgatccatgacgggctgaccattcttgccggcacacaccaatatttccatggagaaaaggtagcttttggaacactctgtcagcttgtcctggaaaatgctccccaagaagagattcgccaggtccttaatttctgtactgctgtgggacttccagtatgtcttgctgatattggcgtggagcagattacagacggggagctgcgccaggtggctgaaaaatcctgcattcctgaggaatctatttacgcaatgccatttcctgtgacggtggaaagtgtaatggctgccattaagacagcggatgccattggcagaaaatataaagaaggctgcttctaagcggacgggaaggggtgtatgaccatgaaaaagattatgaaccgtccggaaacggttgtagctgagatgtgcagcggaattgccctggcccatccccagcttgaaattataccaaaatacaagattatcaagaaaagagagataaataaaaataaagtcagtcttatcagtggaggcggaagcggtcatgagcctgcacacgcaggatttatcggccggggtatgttagatgcggcaatctgcggggatgtatttgcgtcaccctcccagatccaggtctaccaggctatctgcaggacagccagtgacaaagggaccttgatgatcattaagaattacagtggggatatgatgaactttaagaacggagctgcccttgccatggaggacggtctggacgtggattatgtgaaggtggatgacgatatcgcagtacaggacagcctttatacagtgggccgcagaggcgttgcaggtacagtcctggtacataagatcgccggagctgcggctgaaaaagggctgccccttcaagaggtgaaaaaggctgcggaacatgcagtttccaatataaagaccttgggctttgccctaaactcctgcacagtccctgccaaaggaacccccacttttgaactgggtgaggatgaaatagaatacggtgtaggaatacatggggaaccgggtattaaaagagaaaaagtattaagtgcagatgaactggcaaagcggataaccaacgctcttctggaagaacttaagataacccagaaggatgaagtcactttgttgatcaatggtttcggcggcacacctcttcaggagctgtatctgctgaacaattcggtagtgcatgtactggcagagaagcagatcaagatttaccgtatcttcgtgggcaattacatgaccagcattgatatgcagggtgcttctgtttccatgatgaaaatggatgatgagctgaaggaacttctggacaaggagagcgataccccagcatttcatgtatccggtcccgcagagcctgtctcccttgcctacagcggcctggcagacagaaacaaggatgccgggccgtttgacaaagaatatgaggcacgagcctttaacattgaaactgacccccaatatgcccagatagaaggcggtttgatctcccttgataacatggtgtatctagtagataagatgagtgcctgcattattaaaaatgaagtgcctttctgtgaattggattcccatgctggagacggggactttggaatgagcgtggcaaagggcttccgtcagttaaagagggagtggccggacctgatggaacatgctgcccaggatatcgggactttcctaaatggatgctcccttgtgattatggaatactgcggcggtgcttctggtcccatctgggggtccgctttccgggctgccgggaaggccgcagagggaaaacgttcactgtccataaaagaatttgcagatatgctccaggcagcggttcaaggaatacaaaagactggggaacgctctttcggaagaggtgctgtagtgggcgataagacactgattgacgcattggtgccctgtgctgacacatggagccggtgtgcgtcagagggtgtttctgttgcagatgcttttaaactgggagcacaggccgcggtaaatggagccaaatccacagaacaggtagttgcccgaatggggcgggcgggaacggttggagaaagaagccttggctatcccgatgcaggagcttatgcgctgggtgttatttttacagaactttccaacgctatagtaatcatttaaaaaaggagggaacaagttatgtcaatcaaagaatttagctttttatcagcaaatgaacgggaccagatacaggcgtggaggtattcccctttgcaggaaccaaaaggtatcgtacagatcgtgcacggttttggtgaacactcaagaagatatcttcacatgatcgccacactgcaggaggccggatttgtcgtatacgcggatgaccatctggctcacggtaaaacggcagcggtgaatgacacctggggaaatcctggcagcaaaggctttacagcctatattgaggatgagcgtaagctccatgacattgccgttgcagattatcccggtcttccgtattttatgttcgggcacagctggggttccatgatcgccagggggtatggtgaaaaatatggaaatgacctgaaaggccttcttctgtgcggcctggtatctcagatggaagggtgcgaaaagctaaaaaatgacacttccctggaacagatgattcaaaatgggcagggagaatcggacggtatggcaataatgggtgccgtatttgaaggtgttgtggaccgttacgagaatcccacaagccccaacgactggatttcctgtgatccaagggtagtagctgaccatgcacaggatccgttcaataacatgaaacccactgtccagcttttgtatgattttatggaactttataaatatatccaccgggatgaatgggcccagaatattcttcaccagcttcccatctacatcattgccggtgatcaggatccttgcggcaattatggggaaggttcttatcatattgcaaataagttgtttcatggcggaaaccgcaatgttacagtacatatctacacaggttaccgtcatgagatacataatgaacttcccattagggatgaggtggaaaaggggattatagagtttattaacaatcagttatagaaatttttcaggtcccgcttcgctgttttttgcaataaggagctgattgttcactttcggcgtagtattgaggcctgatatgatacctcctaagtagacaagggaaataacccaatctacaaagggggtatttttgttggcgttatgctgatctatgtaggtaataccatgagcaccgcaaatattggaaatatcagttatgtattgtgggcagtaatcggagcaatttttgcgctgagtgggtattttaacttatacgaaactggaaggagacgttaccttccacgatgtagattttggatatacggatgataagatggttcttcataatatcaagctctatgccatgccagaagattgcctttgtaggcagtacaggggcagaggcagttgatagcgatcgcaaagtatagctgggcacatgtatcttaaaagtgcgagaaggggtgtatacgattacatttgatatctaaaaaaggatagaaaacaacacttaattgtgaaaattgtataaaaatttaatggcatatgtgttactattggacattgacaacaatataaaaaacgaatatactacaattacttgatgtaatcgattacaaaagaaacatggaaaggagataagataaaaatcagattttactggctgtcgtagctgcgtcaggaagttttgaaatgaaacaatagatttagagaaggagaatagcgtaaatggggataaaaaaacttttaaaaataggattgctgtctgtgatggcaatggggattttttcttcaaatgttctggcagaggagagcgtaataccagaagttcagacgtttcctgcagagggattggcaatggaagctgttgattggatggatatagacaaggtgtattacagcggattatatgaacgttctgtcacattgggggatgacacagaacgtacttacaaggtttatattccaaccactgctaagtataatgattacgtgtattacatagcggttccggatggtgtggatacagcagagttcctgaagaagagcggttggatcgacctggcggaaaaggaagaaaacagtatgattctttttgtatttgaaccagagaatcagacctggaaggaagcagaaaatgaaatggattatatttctactgccttcgcagatatgaatgataacaatggtctgcgcagatatatctatccagacgagtggaattggcgttggacgggctatggagcagggggagaggttgtccagaattatgcactggagaatcccatgaatattgcttctcttgtagtagtagatggaagtgcaaatattgaacagagcgatttagattctgctggcagcatctgttttaccaatgctgcgacggggtatgtttttgaagaatggtccaatagagagatgccggttcccatatggctgatcggcccagagaatgaagcagttattaattattggaaaaatgccaatgactgtacagatgtgagaacggagctggctgaaggctatcgctatgatcagaaaccattcagcagtaatttaatgacgtatgatcagaaggttgggcaagttcgtgtaagtgaaacagttccggactatacagatcttgaattcacacaagaaatttatgatttccttcgttatttctcacgtactggaacaaagagcccctacagtaatatgctcactgcggccatggatgacagccggttgatcagagaaacaatcatagtggatgacacagaacgtgaatggtatgtttcgctgccggatggatatacaggtgaggaagaacttcccttagtaatttatttccatggttttggtcaaagcggcatactgggaatgaggcagggagactggtggaaatatggaaatacaaagaatttcatttctgtctgccccacaggttctcttacagagccaacagatggaagtattccgtttcattcctggaaaattgggtcaatgggaggagaagaatcagataagctgaatttagattacgaagagaaatttgttcgtgccatggtggacaagctcaccgaagaatacaaaattgatgagagcagaatgtatatcaccggacagtcaaatggcggcggcatgacaaaggccatgtcagaaagatgtggtgatctgtttgcggcatcagcttctacaggaaatccctctgtagcgttatctgatattccaacttttgtattgtacggagaatttgatcttaccccggtatgccttacccaagagggtatgatcggagaagaaaaaattgtctctggaattcaggaagccttacagagcaaaggaattgcatatgtggaaatgggtaccacattaaatggaatattccggaattatatctggacagacagtgatggaattcctgcggtgcggtactgcgtggcagaaaagtgtgcacacagttggcgccagaatattgcagagatgttctggaatgaatggttctgcaatttttctaaggatttagaaacaggaaaaacggtatataggaacatgttttagcaaagccattggaggtttatgaacaaaagtaagaaggagaagggagaatttaccatgaataaaaaaattaaaaccatgtttctggcagcagcagcctgcctgcttgcatcatcaagtgtgatggcacagacaaagtctgtcaattatgatccgccggttgtggagattgaagatggagctttaaaaggatttatgaacgaggacacttattgttttctgggggttccctatgccacagcggaacgttttgaaatgccccaggaagtagaaccatgggagggagagagaaacgcacaggcatacggagctacctgccccattgaaaatactacatcagtaagtggaaatgcctttgtgtggccccgccgttattgggtgcagaacgaagactgtatgaatctgaatatctggacaccgtccattgagtcaaatgcaaagaaaccggttatggtgtttttccatggaggtgggtttacaaatggctcctccattgagggcgttgattatgacggtaagaacctgagtgaattcggtgatgtggtagtggtaacagtcaaccatagattgaatgttcttggctgtcttgatctttcggcatatggggaagagtatgcaaattcagggaatcttacattggcggaccttgtagcttccctaaagtgggtcaataaaaatattgaagcctttggcggagatccggaacgtgtaatgatcttcggccagtccggcggatcttcgaagacgtctgccatgtattatattcctgaggccagtggattgtttaccagcggtgcaggtatgtcctatggtgcacctgcaagccttgagccaggagaatctgcagaagcagcgaagcttgtccttgagaagctgggtatcagtgaagcagaagtagacaagattaaggaagtcccatataatgacctgatcgcagccggtaacgccgctctgaaggaactgtctgaagaaaaggggaaaaatataagctggtcccccaccatggatggaaaattttatctggaggagatgacggagtatggaaaagaggttccgtatatgtgcggctccgtattcagcgaattcgcaggaacccagcataaggggattcgaaaaaatgaatggaccgatgaagaagtagatacaaaactgacagaggcttatggtgaggataaagatgcggttgtcagtgaattttcagcactgttcccggataaaaaaatacaggatgttatgttctataatgacagacattttggttcaatgatgggcaacacggtggttggtgctgtagaaacggcatataagtccagcaatgcgccaatctaccattatctgttttcctatgaaatgccggtaaatggcggaattacatcattccacggtggagagctgcattatgtattccataatgtagatatgccggatgtgaaactggctactggcggaacagaagagagttataaacttcaagatgagatcgcccaggcgtttgtaaattttgcagcaacaggaaatccaagccaggaaggtttggaatggaaaccatggacagaagagggagaggaaaccatgatttttgacacaaacagtcagtgtgtttcctttgatgatcttgcattgtgtgaattgcttgacgcacataaataaggtagttgaaaataaaaaggaagagtcttaaataaatatcatttttaagcctttcatacaaaggaaaaacatctccagggacaacaagtgtcgtttctttgggggtgtttttcttacataaaatgtaaaacgcctgaaaaatgtattcgattacattttgagaagaaaacagcaaatgacgacggatgtaaaactataaatattgcacaaaaatacaaatgaatatgtattgaatgtgtacattgacaacagatatgaaatagaatacaatagaatcatgaaatgtaatcgattacaaaaaatgctgaaagaaatgacaaaacaaaaaacaggaggagagaaatgaaaggcatatggaaaacagttgatactgtgatcgcctggatcgaagacttggtctcaggtacatgtttggcagcggttgtctgtatcgcagttgcatcagtaattgggcgttatgtgtttcaaaccggatttctttgggctgatgaagtaaatcaggccctgctggtggcagtaggtatgtttgggagcgcccgggcggtgcgctacaacggacatgcagagttcacttcatttattgcaaaacagaaatccagaggggtaagagttgcaatgaggggagcgatcatggcgctgaccctggtacttttggtattcatgctggtgatctcttatcagttcacaatagcaggaacgatgaaaacttcagtactgcgggttccgagaatgtacttttacatgtcaattcctataggatttgcactttgtgtatatgaatacctgaaggtagcaaaggcaagagtacttacagatgctcagccagaagacgagtaaacgaggaggcacactatgggaaaaataatcgcaatattagtcattttaacatttatattgatcattaccggtattccaatctacataagcttgatgttcacaggactccttagtctggtagctctgtcaatgtccacaggtacaccagtagcaaccttggttattccccaatccatattcaatggtatcggcagtctgccgctgctggcaattccattcttcatgctggccggggagattatgaaccggggcaagataacggagaaactcattaagtttgccatgctgctgatcggacgtcttccagcaagccttgggctttctggtattgttgcaagtatgtttttcggcggtatcacaggatctgctcaggcaagtacttcctgtatgggaggaattcttataccggccatggccaaggaaggatattcagttgctgaatccgttggaattatcgcgggtgcttccacatgcggcccgatcattcctccaagtattatcatggtagtatttgccacagcagttggcgcttccgtgggagccatgtttatgggtggtctcatacctggaatcctcatcggcctgctcctttgcatcatggttttggtccgtgaccgtaaataccactttccacgccgtaccgagaaattggacaagaaggaagtaagacagacgctcctggatggtattattccccttggcatgcctctgatcatcgttggaggaattatgggaggtgtgtgtacacctacagaggccggagcgatcgcagttgcgtacagccttttggccagcctttttatcagccgcacgctgaaagtaaaggatatttggaaaattcttttgtccacagttaacagtgcagcgcctctgcttctgatcattgcctgtgcaaaggtattcagctacggccttacggctcttcagatgcctgttattgtaaatgatgccatcctttcactgacacataataaatatgtatttttgttcctggtaaatatcctgttgctggttatgggcatgttcatggatggcggcgcttcggttatcattcttgcgccaatccttacaccggttgccgtccagcttggcatcagcaccatccactttggtgtggttatggcattgaaccttaccattggaaatatcactccgcctcttggctattgcagctttatcggaagccgaataggagggatttctgtggaggaagggttcaaaggcatcatgccttatttgatcgtagaaattatcgggcttttactgatcacctatcttccattctttgtaacttacttacctacgattcttggatacagtgtgatttagaaaatttaacataacgaaagggaaaaaatatgaagcttagcgcatgtacagcagcctttggaatggctgatctgaagaagatcattgacacctccgcagcacttggatatgacgcagttgagatcacggcagcacttcacctgccggtggattccacaaaggaacgccgggaggaggtacttggctggatcaaggatgcagggatcgtctgcagcggacttcactacatcttcgatggaacacttcgtctgctcagcacagatccggagatgatgaaaaaatcagtagactatttaaagaaagtcacagacttagcttacgatatggaatgtcccaccatcattctgggcagcggaggaaagaccagaagctttgagccagaatgggacagggaagctggtgtgaaatgtatggtggaagtgatccgtgaagttggcctgtatgcacagactaagggcataacctttgccatcgaagctatcaaccgttatgagacgaactttatgaatacgctggaagaggccgtgaactttacaaagctggtaaatcttccaaatgtgcgtaccatggcagatacctatcatctgaatattgaagagaaggatccagcagagaccatccgcaaatatggccacacacttgccaatcttcatcttgctgattccaacagacaggcacctggagacggccatttcgattttgcgtcagtggcacaggcacttagagaagctggctttcaaggctattgctcttttgaagtatttggcttgtatccatggaagctttggtatgacacctttgaggagtctgtggagcatatggggaatggtatcaaggtagcacgtgaaatattcggttaaatcatagaaaggatcggtttatgagaaaagtagcattagttgattatggaaaattagagctgcaggaaaatgttcccagcatcacagctcttgagcctggaacagtaaaaatcgatgtaaccgcatgcagcatctgcggcagtgatatcgcactttacaaaggaagaagatccctggaggcggaacgatattttgggcatgagttctctggtgtggtagttgacccaggcgatggtgcaaatggcatcacaaagggaatgcgtgtggcaagtgagctttctaagacctgcggtcattgctggaattgccgtaatggtcttcccaattactgtaagagtatgaatgacgcacttctgcccggtggattttctgaagagacattggttctcaatacggatgaatacagcttcatcagtcccatcccggattccatcgatgatatcaccgcaaccatccttgagcctacaaactgtgcctatcatgtagcccgccaggcaaacgtaaagcatggcgagacagtggtcgtatttggtatgggccccatgggtctgatcgcagcccgcattataaagagcatgggtgttgacgtagtggtgggtgtagataacaacaaagcacgtgttgacaaagtgcgtgaacttggatttattgatgtggtgaacagcggcgaaggaaactggcaggatcagatcttcgagatggtaggcgccaagggtgcagacgtgatcgttgaacttacgggagtcaatgcagttcttcagaatgctttccaggtggtgcgtcccggcggacgtctggtggtaggcagtgtatatcacggattcgcagagcaggtagagcttcttccaattatgcgaaaagaactgacaattgtggggtccaaaggaccatatccccatctgaaaacagatggaagatctgcggcggtagatgtacttgtgaagctgcaggatgatctgaagaagctgatcactgtttatgattataaagatgctctccaggcatttgatgacatgatgtcaggagcagccatcaagccagttatccgcttccgttaattcaatataataaggagaaaagatatgacaaataaggaacatgtaatgaaatatggtggaaaatttagtatcagtggaggcgaggtctggacaatgccaaatggccatgacgtacattttgcattgaatccaaagatgggctgccggggtgccaacattgcggttggtttccacaaaccgggcaaagagttcgcaccacacgtgcatcctatctcagaggaaattctcatcatccacagcggtaaaggtgagtgctacctctatgacaaatggattccagtggaagccggagatatcgttttcgcacctccaggagtctatcatggaacacggaaccctgctgaaaacacagaggattttgttacacttgggatcgcaacaccgccacagctggatctgtatctgcgggcaggatacgatattcttgaggacaattcaggggaatatgtagaagagtaaatcataagaaggagataagaagtatgttttttgatgattatgcacagatgctgcaagatacagtagccggagttaagagagaagatgttcagaagctgtttgatatgatcgaagaaacaagagtaaacggaaaacgcctgttccttcttggaaatggtggaagtgcagcagcggcctcccactgggtatgtgactttggaaaagggatcaacaccgatcattcaaaacgtttaaaaattgtgtctgctgttgataatacagcgattttcagtgcacttggaaatgattttggttatgagacaaccttcagtgagcagctgaaaaatttccttgagccaggagatctggtattaaccttctccgtttcaggaagttcaccaaaccttgtagaagcccatcgttatgcaaaggaaatcggtgccaaaacagcatgtgtggttgctgacaagggaggcaagatcatcggcatgtcagactttgccatgatcgttccttcagagaattatggtattgtagaggatattcatgtgatccttggacatgccatttcccagaaaatccgggccatcaacgaagcatcttaagcaggcttttgggaggaaaaagaaatgtatatcccagcgttagacattggcgggaccaaaaccatcgcggcagttttgaatgaaaaaggagaaattctcacacaggaaaattttccgtcactggttaccagctatgaggcccatctggaattgtgtgtggaagcaatgaaacgacagatcaagaaagctggagttacaagagaagacctggcaggtcttggggtatcccttcctggcattgtggataacgaaaatggggttctgctctatgcaccctatgccggctgggaaaatgttccggtggcagattatttatcccaagggttagatatccaaaaagtctgttgtgaaaatgatgtgaatgcctgtgccataggcgaattgagatttggtcttggaagcaagtattccgattttatctggatgaccgtaagtaccggtgttggcggtgcagtggtagaaaatgcaaaattggtccgtggcggacatggatttgccggagaactgggccacctgaaagtagaatatgatcatcctgcacactgtccatgcgggcaggagggctgtctggaagcccatggctcaggcacggcgctgatccgtgaaaccaagaaaatggcagaaaattctgttgaatttgcaaaagcactgacagacctgggcaaaaaagcggacggtgcggggtgtgcggcactggcaaatgcaggcaataagcaagccctgcagatcatggatcagatcggcacctatctgggaagaggcatttcctattgcatgaatatattggatatgcaggcagtggtcatcggcggaggcgttgcggcatcatttgatttactacttccctctattcgggcttccattgagaaaaacgcatttaagcgtatgcacaatgtccacattgtcagaacaccccttgggtacgaggcagcgcttatgggggcagcagccctggttctgcaggaatgatataggaggagaaaaaccaacatgaagagattaaaagcagctgttattggttccggttttatcggcggagcacatgtagaagctctgaaacgagtacctggcgtagatgtagtggcattggtagatattatggatgcacagcgtaaggcggaagaattggatattccgaagggattttcagattatcgtgaaatgatggaagaatgtaagccggactgtattcacatctgcactcccaataatacacataaagagattgcaatgtacgcctttgaacatggcatacatgtcatctgtgaaaaaccaatggcaagaaatgcggcagaagcacaggaaatgcttaaggcagcaaaggacagcggcctggtaaatgcggtgaacttccataaccgtttctatccggcgaaccatcagctgcgcaacatgatccaggatggagaactggggacaatctacggtgtccacggcggatatctgcaggactgcttctctatggaaacggatttcaactggagaatgttatctgaaaatggcggaagcacacgtgtaacctctgatattggatcccactggatcgatctggctgagtatgtgacaggaagtaaagtaaaagaagtttttgcggagtttcagaccaaccttcccttgcgaaaggtgacaaaagatggtatgaccacagatgtggaagtggatacagaagatacctcctatgtaatgctcagatttgaaaatgggatcattggaagtgctgttttttctcaggtatatcagggaaagaaaaaccagacctttatcaaaatcgccgcatcaaatatttcagcagagtgggacagcgaagccatcggggatctgaagctgggttatcggaatgagcccaaccgtgtgcttaccaaagaccctgcattggttcatcccaatacagcgcccatcattacgtatcctggtggacatgtagaaggattcccagacgcttttaagcagaactttatcgcgatctatggtgcgatccgcggggaaaaatcccccaatccatacgcaacctttgaagatggccttcatcagatgaaggttctggacaagatttatgaaagtgccaagtctggccggtgggtcagcgtaatctagaaactatggcagacatggccataaatataaaaaaaagaaaaaggagatttatcatgaagaaaagagcgatttctatgttactagcggcaggtatggcgttcggcgcaacaacagtgacagcttcagcccagacagttgtcaagtattcagtaacctacccatcaacaggcacccaggcagacggcgcaaacagactgggcgaactcatcgaagagtgttcagaaggacgtatgaaaatggaattctatccatcttctcagctgggtgacaaatccgctaccttggaaggtatggcaattggtaccattgaaatgacagagtgtgcagctacggacctttctgccttcaatgatatgtggtctgtattctctcttccatacctctgggaaaatggaaagcaggcttgtgcaaccgtaatggatccagccgttcgggaagtccttgatgcagacatggaagcaaatggtttaaagattattgcatggaccgatatcggaagccgttctatgctcaacgatgccaagacagttaacactccagaagacctttctggtatgaagatccgctgtatgcaggactctgtacttgctgatgccacaaacgccatgggggcaattgccacaccccttgctgcaagtgagatttacaccgctctccagcagggaactatcgatggtttagaccatacgccttctgttatcgtagcgaacggatatcaggaaattgccaagtacttctccctgacggagcatttcaccatcccggatccagtatttgtaagcaccgtatggttcaataatcttgctgaagaagatcagaaggctcttattgaagccggcgaaaaattcacagatgaatggaacaatcagatctggccggaagccacagaggaaggcctgaaagttatgaaagagcagggtgttgagattacagaagttgacaaagcaccatttattgaagccgttcagccagtggtagatgacttcctggacaaagcaagcgattcccagaaagagctttatgagctgcttatggaaacacgtgagaaatattaattaataaaaaaatgttcttgggggagaaatttatgaaaaagaaattattagcggcctgtcttctaggtgcagtacttagcacaaatacagctatggcagctgagacagatactgtatcggaaaatgctgcggttacggttgtggatacaacagttgcagaagaagaggccaaagttcttgaagtagatattgagaaatatcaggtaaattatattgacaatgttgcctaccgtcagatttgggatggaaaaaccaatagacagttacagatgaatctaatgatccctaagctggagaatgagacaccggcaccagtagtcatctatattaaaggcagtggttttactgcccagaacttggaaggctttattcagcaaaaattgtatctggctgaggctggctatgcagttgtctccgtagaaggaaggatggtaccggaagcaacgttcccggcatctatcattgatttcaaggcagctgtccgttatctgcgtgctcatgcagaagagtataatctgaatacggataagattgcagtctggggtgattcttcagggggatatgcagcctgcatgcttggtacaaccaatggtgtggaagattttgaagaaggcgattttctggaggagtccagtgatgtggcttgtgtgattgatttctacggtcctacggatttaacaacaatcggccagggactgggagaagaagttgaggcggctcatctttcaccggctacaacagaagctcttctggtaaatggtacagcatttcctccaaatgcgggtggcggaattacggaatatccagaaaaagcggcagcagcaaatccgattacgtatattgacgaaacggacccagaatttttgattattcatggggatgctgatacgttagtttctccttatcaatcgaaagttctttatcaggcattgaaagagcataatgttcccgcagaactctacatagtccctggcgcaggacatggcagcagtgaattctatcagtctgatgtaatgaatctggtattggatttcctgaacaaaaagctacagtaagtggcttgtgcgtaaaataaccaaaacttaagggtaagacttcattcagccacaggcagaatgaggtcttaccatatagaaatttcatattaattaagaacaattggacacagagaggaagaaaagctatgagtacgaagaaagtacgtgttggaattattggagtaggatatgttgcaagcaataacttccttccagtgcttcctaggtttgaggatgtggagattgcagggattatggcaaaccacatagagagtgcccaaagggcgcagaggatgtgcggggcagagaatgcggtatcttctttggaagagcttgtaaagctggatcttgacgcagcttttgtgctcaccccaaaagcatgccactctcagcagattgaatttttgttaaaagaaggattagatgtatacagtgaaaagcccatggccacaaccttaaaggatgcagaccgtatggtagagctatcccagcagacaggccgcaagctgatgattggatttaaccgcagatacgctccggtttgccagaaagcaaaagaggtctacacagatatcctgccagacgttatcatcgcacagaagaaccgtccggcaacagagtatcatgccacattggaaaatgccattcatatggtggatttgatgcgatactacggaggggaagtaaaggatgtacatgccatctccaagttcacagatccggactatgagacatttaccacagcccagcttctttttgaaaatggcgcatccggcatgctgatcgcagaccgaagctccgggcaatgggaagagaccattgagatacatggaggcaaccgttctgcatttattaaaatgccagacagcgtgaccatcacagacgggcaggagcagcataaaacagccatgactcccctggctatgggctgggcacgttctgaggataagcttggtttcagctatgccatccgccattttatcgactgtgtaaaagaagataaagtaccgctgacaaatgcggcagatgcattcaagacacatgagcttctagacagaattttaagggcagcaggactcccaagcatgggttaggaggaaaatcatgagaattgctggacatacaatgggcacaccggaatatacggtgtgtgaagcaattgaactttttcataagatcggcgcagacggtgcagagattgtggtgcaggatggatatgtctccgggattccctgtgactgtgaggaagctgatctggaagcaataaaaaaatgtgcagaagaaaataacattgagatctgctgtctgacaccatacaattcttacttcgattctgtggatgaagagcttcgccacaaagaggtggaaggaatccgcaaggtaattgattactgcgaatatctgggagctcattttatccgtatctatgggggcaacctggttgcaggagatacacagaatttggaagaacggagaaaaaatctcattaaatcgatgcgtgatctgggtgatctggcattaaaaaagggagtgactcttcttattgaaaatcattttaataccatgtccgtatctgcaaaagacagcgcggcattgatccaggagatcaaccatcctgcagtacgtatcctttatgatcaggcaaatctcacatttacagaaaacgaagactatagggaagccatctccatacagcagcaatatgtagcatatatgcatgtaaaggatctggtatttattgaagggaaatcctttgtttcaggagaggtttctcatccaaaagaatcagacagaaacgtgatcacaaagattgtgggagaaggaattcttccctggccacaaatcctgaaaatggtaaaagagcacggatatgacgggtggctttctctggaatatgaaagaagatggcatccaaatgatattccagatgcatcagttggaatgaagaagagtatccagtatctgaaaacaattttgtcataaaataaagactcatgtagaactatgagaagcaggagatggatagaatgaagattgctttattgggtgtgagccactggcatctgcccttgtatcttcctgggttaccggaaaattctgtggttggtatcagcgatgaggatttaaagatcgcggcaaacgttgcaaagaattacggatgtcccatttaccaggattataagcagatgatcacagagacaaaaccggattttgtatttgcctttgcaccacattaccgcatgaagtctgttgcggagtatttgctgaaccagggcattgctttttccatggaaaaacctgcgggattaaatgcaggtgaggtagaagcgctttataacctgtgtgaacagaaaaaaggcttctgctccattccgtttgtatggagatatagtgataccgtaaatgatttgaaaaatatctatttaaaggctcctatcatacatatgtcctatcgttttattgcaggacctccttccagatatctggcaacctccaaatggatgctttccaaaaagactgcgggcgggggatgcatgacgaacctgggcgtacatttcattgatatggccatgtacctgacaaactgtaccaaggcagaggtactggcgtccagttataaatatgcatgggagtatgatatagaaacctatgccacctctctgctggaaataccaaatggtacctccctgcttttggagagcggttatgcctatcctatgtcagaggaaatgaaacgtgagaacaggtggaccattgtaacccaagacggatattatattcttgcggaaaatcgtctggaactgagagagtacggccaagaacccaggatgatcccgctgaacacagacagcgatgtttattatgcagaatatacaaagaccacattaaaggactggatgacagggacaacaccaagagcatccttaaaagaaatgctggacacagcaaggatcctggatgcaatgaacgcaaagagtgttggataaagcctgggacaggaggaatcgaaaatatgaaattaggcggatttggccggatcgcggattatgagaagatccaggcagcaggttttgattatgcggaactggatgtaccggaaattgaagcattatcggaagaagaatttcagattttgtgtgagaaagtacaaaaagcaggatttccaatattgactggtgcaagagcgcttcccatagctgacccttggttctttacagataaattttccatgaaggaatatgaagcatatctggaaaatgcatgccgcagagcaaacaggatcggtatgaaatccattatcataggaaacggaaaggcacgtatgcttctggatgaaaccagcatcagcaaagaaagccgctttatagactttatgggtatgtttgctgagatcgcaggtaagaatgatttggaagtgatcctggaaccccttggccctaagtattctaattatattaatacagtgccccaggccatacgtgtgatcaaggaaatccccatgccgaatgtatttaccatggcagatctccgccatgtagtgtggtcgaaagagacgtttgaagatatcattacttatatagattcgattcatcatattcacatcgattatccgctgtcatggccggagcgtccctttcccaccatggaggatgattatgattacacggactttcttggcgccgtcaaaaaatcaggataccggggaacattgacgatagaagcagatattccagaagactggaatatggcatatgataaagcagtagttgtattaaaagatgttttaaataaataatcttacattgcaaggcttgatcgcttggcttttacacattatgattcttgacttttttgattttccggtttaacattcacttatgtattaaaaactggaggtacaagaaatgtcagatgttaccatgagtgacgttgcaaaggcagcaggggtatcagtggcaaccgtgtccaggatcatgaaaaatcctgaggtggtaaagccagagaccagagagcgggttcaaaaaattataaaagagatgaactatcagccaaatgcccttgcccagcagcttcgtacgcagcagacgaacatgatcattgtgattgtgccggatatcgaaaacactttctatcacgaaattattcgaggaatcgaaactgaggcagaggaaaatggatatcaggtattgatcgcagatctaaaaggacagccttctttggaaaagtattatgtgaaatcaatccaaaggcatcaggtggatggtattatttcagtatctgcaaaaacggtagagaagctgttggagacagttaccggggactatcccattgttttgatcgcgcaggggattgataaagcagatattccaagcatcaccattgacaatgccacggcggccagaaaaatgatgagccatctgatcagtatcggacaccgggagatcgcacatataacaagttcggaattgctgcccttgtatcaggaacgactgaaggggtacatagctgcgttagaaggaaatggaattccggtggatgaagaactgatccgaagaggagaggcatccatcaagggcggatacgagcaaatggaagctctgatcgggaaaaagaagaaaatttctgctgtgtttgctgccggtgataccatggccattggagccattcgggcgctgaaggaacatgggttctctgtacctgaggattgtgctgttgtgggctttgatgacattgacatggcctccttttttgagcctgcactgactacagtgagacagcctaagcgtgagatgggtgaaatggcattccgcagattgttggctaagatcagaaaagaagccatacaagatatgcagacggttctgccatatgagattgtgatccgtgacagctgcggatatttaaaacatttacgataattgacttgtttacaaagactactgcttaaatgaaaattcattaggcggtagttttttctattataggcatgggaggaagatatgagaccaattacaataaccactggtcagtacggggatttatccttagaagaagtatgcaggcagatgagcgccattggatacgaaggccttgagatcgcatgccaatcacatttggatgtacaccgttacctagaggaggaagcctatacaaaagagattgatcagatcctgaaaaaatataatctaaaagtatgggccctgagtgcccatttggcagggcagtgtgtgggcgaccgatgggatgagcgactggataattttgcaccagcccggtatgccggcagaccggatgaaatacgtgcctgggccatagaggaagtgaagacggtggccagggcggcaaagaaaataggggcagaagtggttacctgtttcatgggttcccccatctggccattctggtattctttcccacagaccacacagaaaatgatcaatgacgggtatggaaggatcaaagagctgtgggatccaattttcgatgttttcgatgaatatgacatcaaatttgcattggaagttcatcccacagaaattgcctttgactattatagtacaaagaaactgctggatgtttttaattggagaccagcccttggcattaattttgatccctctcatttacagtggcagggaatgaacccctgtttgtttctgagagattttgcagacagaatctaccatgttcacatgaaagacgtgaaggtccgcctggacggcagggcaggtattcttgggagccatttagagtttggcgatttgagaagagcgtggaatttcgtctctcttggacatggagatgtggactttgacggaattatccgggaattgaatgcaatgcactacgaaggaccactgtctgtagagtgggaggattccggcatggaaaggatgtatggggcaaaagaggcgtttgagtttgtaaaaagaatgaactttgagccttctgcaattgcctttgattctgcattaaaaacagattaaattcaaacaaatatgaagtttaagcgaggagaaaaaatatgaaaaaattatttggaaccgttgtacctattattacgccccttaccgaagacgacaagattgacgtggaatctttaaaaaaactaacggatcactgcattgacggagggttacagtgcctctatccctgcggaacaacgggcgagatgatgtatctcaccgtagaggaaagaaaacttgtggcccagacagttgtagatcatgcagcaggccgggttcctgtgtttgtacatgtgggagcatggaatctggcagatactctggaacttgcaaaacatgcggtagagatcggtgcagatggtgtcgggattgttacaccagtattttatcagatcagcgagaaaggtatcgcagagtattatacaaccgtagcaaaagcacttccagaagatttcccggtgtatctgtatgggattcctcagaacgctgtgaatgacctttctgtttctatatgtgaggcagttgcaaaagagtgtccaaatgtaattggagcaaaatacagctttccggatatgaccagacttcaacagcttatgactgttaataacggtgcgtttagcgttctggtggggccggaccatttgtttgaagccgtggcagccgtaggcggagacggggtggtatctggtaatgccatgtgtattccggagcactatgcagctatatgggaagcgcttcagaaagaagatatgaagcttgccacaaaactgcagcgccgtacaaatattctcaatgcagccatgtgtgccatcaataatattgctgcttacaaagtgatcctgaaagcagaaggcgtcatcgcaactacaaagatgagacgaccaatggagaatcttacaccccagcaggaagagcagcttcttaaaacaatcaaagaattaaattaccgccaggttccacaattctaatataggattccctgagatttcggggcgtggaggtaatttgaaaagaaaaagataaaaaaggtccctctgttcagccatcgattgggaaacagagggacttctttgtggggaggctatggatttaattctgacgtaaatcataaccgtcctctgccagtataactttacagcgctttttgtaacaggcgattccatatttcagaatctgctccaatccttgcatatgaagcgcttcttcatatgctttcttttctattttacccaaggcggctttgcagccagcttccaggctgccatcctctgagtatttgatctccaggacaattcctattccttcatcctcaacttctatcaggatatcactgtatccttctccagattctttattggaggagacgacccagctgtctttaaagcctagaagcccaagcaaaatgccatgataaaagttttcctttgaccgcttttttacaaaggtatcccggatgctgatggtctttctcagatattcattgagcagcttttcaacgcctgctgcattcccgtttttcaaagcatcacagaatttttccaaagtttctccgtccttttggacactctttttaaataaatccataatctgtgtagtgaagatcttacggatttccatattgggaattgccagttggaagctgctctcctgtggtcttcctctctgggtaagatagccggtggtgaacaggacactccatatattgtcaatggaatcatacatatccttgtaggtcagctcctgatggatttcctttgtgatcacttccccggcaaccagacgctcaagctcatttttggtggtacctttgtctgccagcgcaagaaagcgctttaccgcatcattgctgctggtattggaccagtaattttccggctgagcgtctccctctgtgcgaagcttgctgcaatagcagatcacatcccaagggcagtatacctctatgcggccgaactggtatccgtcataccattcctttatggtatcatagctggacaaaagctgataatattccagtaagtctcgtacctctctgtctgtaaatccataatattcatcaaaggctgcatctgctatggacaggactcttaggttattcagcccggtaaagatgctttccttagagatacgcatgcacccggacagaaccgcaaactgcagactactgttggtttttagtgcctgttcaaacagattgcgaagaagaagcaccatctggtcataatatccttggtcaaaagctttggcaagcggaacatcatattcatcaatcagaagaatcactttacggtcatgatgcttttgtagaagctcggacagtaacttcagagaatagcacaacgtgggctcgtccatgttatccatcagcagcagagaaaatgcttccttatcatgctgtgtgagacgctgactttctaaaagatactgtacccttctggcttctccgtttataatttgaacggccattttgcatgccttatcataggaagctgcattgatccctttaagggaaagagaaattacggggaattttcccatatactttttacacaaatccgcatctttgcatatgtccaagccattaaaaatgcttttgtcaccttcaggggaaaagaagcttttcagcatactcatgttcagggacttcccaaatcttctgggacgtgtaaaaaggtttacttctccccaattatctaaaagatccttaataagtccggttttatcaatatagtagaaatcctccttccggagcttttcaaaatcctcaattccaatgggaagtttcttttttttcacatccatgggctgttcacgctccttcctgaaatgctggaatccttcacaaggtttcttctatattgtatcaagccttttgcgtggcggctagtcctaattacacaatacttgcagagaaaactcctcaattcttacatatgtctcttgcatacgtccttatttcaaaaagttgatgaacgccgccactgcaagaatgctggccatttgcaaaatccataagcagctaattaatgtagaggatatatttataatactccggctcttgttgttcttcacgcagattatggaaagtgacagccccagtatgacacagaagatattccagccaacccatacactgctcactgcagtggataaagtgactttgaataaaaccggtataaaagttgccaatggcagcagactgaccataagagccaggatacttaatttgtaaaattttctgtttttcatagaatcacctcatttctttctttccaaattgagtaacagccacagcaagtaccagtacaaaaactaaaatggcacatggcagaaacggcatgagcgaaaaagcagtcccggagctttcggcagtaaaatcgtgcaaagagcaagacaccagatacccgctgtaacaatagggatatacgatccaaaggggtgtgtttgccaccagcacaccagggatcacaagaagcagattcaatcccacgcaaagcagcggcttttcaaagagcaccgtaatggtccacatgacagccacgcagggcagcatggtgaggaacagtccgaagcaccatttgaggatataaagcatgggcagcgtttccgtgattcccgttgtatttgcagcgatcaggcctgcagccacgaacaccacgaaaaataccgccatctccattagcagataaaagatcagtacgcagaatttagcaagtgccagtgtatgccggcttacaggcaaggccagcatttttaaaatgccgttgttttgtgtctcacgtcccgcgatcaatacgttgactacgatcaaactgaacggcaggagataataggcgtaaaccagtgcgctttgtatgaacatggctggccaggcattggtatattccggcgtgaaatacctgcttaaattggcaatgccggaggccaccaccagcagaggggcaataaagatcaaggggatgatctttgagcgttttactttcatcaactcaattttcaataattcaaaaaatgtcataaaaaccctccttactcataccgtagatgacctgccatccataagcctgtcagcaggaatacaactgtttccaccagggcggccgtcacaacagcggcatttggctgcgcatgcatggcaacagcaggccgcagcataatcacaaagggatgggccagaagcaggtccgcatccgcatttgccaaggccatgccgcttagaaaacctgccacacctatgcccaggggaatccacatattttcaaagcgggatgaaaccagcagcataaatgagagcaccggcatggaggtgacaaaggaatatgccgcaaatttcagcagcacgtcaagcgcaaaggaaccctggggaaggtctgtgctaccaatctttgcaagtgccagattttgtatccctatagctgcaaagagcaggacagccaagatcaggaatttacagaagtacatgcccggaacacccatggggagcatatagattttcttgacggcgtttcctttaaattctatgttgtagatcatgcaggcggctgccacgataccgaacatattcagtaccatgatcatgccgtagagctgggtgagtaaaacatccatgggggccaggggcagattcagcagcgtatctttgcgcacaagaaagttcacaaaagcgtatgcagcccccaaaatgcctacggccaggagaacggggatgataccggtgcgtttctctttctgaagctctattataagtgttctcatagccgggccctctgctttctggcttcattgtcctgatccaccatggagaggaacatgtcctccagattgtcggcggcaaagccggactgtaaggcattttggcgcagctcctccatgctgccctcaaagagcaggcgtccatgattgaggataccaatatcatctgctattagttggatttccgacagcatatgtgatgagatcagtatcgtgcagtgacacaggtccggcagggcttttatcagattgcggatttcatggatgccggaggggtcaaggccgttggttggttcgtccagaatgagaatgggcggtctgccaatgagggcggcggcaagtcccagccgctgcttcatgcccagggaatatttttttgccaggcggccaccaaactgggaaagccccaccagctccagcgcatcctccacagaagttttaggaagccccaaaatgcggcggatgatatctaggttttcacgcccggtcaggttggcatagaaagatggctgctcgataaaagagccgatctctttcaaaatagccagccggtggtcaggaaatttttttccgtcaatggtaaagctgccatttgtgggagcggtgagtcccagcagcattttcatggtggtggattttcctgctccgttggggccaagaaagccatagatactacctttagaaatatggagagaaaccccatccaccgaagtgaaatttttgtacttcttagtcagtctgtcagttgtaatgatataatccatagtcacatctcctttcgatagttttatcataccgccacatcctgacatttacattctcccgtccttacgtttaccttactttttaacagggcatctttataaataaacccagtatgttataataatcctcacggagggatagattatggaacattcttatttgaacagcaaaaagatactgctggtagatgatgagccagacttattaaaattggtatctgctattctgggagatgaaggatttttaaatattgtcacagcgggcacggcagcggatgggattgtggctgcaagacaagagtgcccggacctggccattttggatgttatgcttccagacggggatggtttttcgcttatgaagcagatccgcacatttacggatgtgcctattatttttttaactgccaaggaagaggcagcacacagactggctgggcttggacttggggctgatgactatattgtgaagccatttcttcctcaagagctgcttctgcgtgtctatgcagtcctgcgccgatgttataaggaggagggcggtatggtgaagctggcaggcagtaccattgattttgaccgggcgcaggtatacagggatggcaaaaccataacattgactgccaaggaacatgctttactggaaactctggcccgcaatgaggggaaaatcgtcacggtggattccctgtgtgaggctctttggggtgataatccctttggatatgagaacagcttaaacgcccatgtgcgccgcatccgggaaaaaatagagagggacccgtcaaaaccagtctctttgatcacggtcaagggactgggttataagctgaacacgaggaaataacgccatgaagtcatttgcaaaatatatttcaaagtatctggtctcttttgtgggatttgtgatcctgctgctgttggtgaatgttttgttttttgcatggaccttccgcagcgacatcacaaatgaatatggctccacttcaccggaaaaaatgctggagaaaactgcggatgcatctaccatcaatggaaccacagatgaaataaaagcgctgctccatgaaaatcacatctgggccatttatttaaaccagaatggcacaaccgcatggtccacaggagcgccaaaagtacttccatcaagcttcaccattcaggatgtggctatattttccaaggggtatctttgggattatccagtttttgtccaggctgcagaggatggtcttctggtgctggggtatccaaaggacagctatacgaagttcaccagcaactatttttccgtgaactcccttagaaaaatgccggtattttttgcggccatattgatttttgaccttggcgttttgtttgttgtgtattctttatccaaacacaggatcacaaaaagcacagagcccatcattgcgtctgtccaaacgctttctgagggaaagccggcggctctgcctgtgtcaggggagttaggggaattggcggccagtgtgaataaagcatcccagatcctcagccgccaaaatgaggcaagggcgaattggatcagtggggtttcccatgacatccgcactccgctgtccatgatcatgggttatgccggccggcttatggcagacagcacagcgagcagctcggtcagggagcaggccgctgttatccagaagcaaagcacaaaaatcaaagaactggtgttggatctgaatttagtatccaagctggaatatgaaatgcagccgctgcataaagagaccgtacgtttgtccaagattttgcggtcctatgtggcagatttgttaaatatgggcattccacaggggtattcggttgatattgcggtatcccctgctgctgaaaaggcagcgctggactgcgatgcccggctgatcaccagagcggtgaataatctggtgcagaacagcattgggcataaccctggagggtgccacattcaactgggtgtgagctgttcagacaccacggtttctttgcttgttgaagacaatggtgtgggcctggcgccccagaaggtgagagaactggagaaaagaccgcattacatggaaagcaccgatgaacgattagatctgcgccacggcttaggaatattattagtacgccagatcacggaagctcatagtggtacgatgaccattgaaagtaaacccgggcaggggtataagacaattttggaatttcaaagagtttaatactggatttatggtgcagtatgatctcaaatgatccctagccgtatgaactggcttggtatagaatgtttaattaagaatgcagttaacgattgacaaaatggtaaccgcgatcccactgatcatagacggtggattaaggttgcccaatggattggagataagagtttcatgaaaaaggatgattttagatatacaggagaatttgagaaacaaaaagcggttttcatttgttgggcggatgttccgttttcagcagaaggatacgatgttcatgaggtatttgtacaggtaataaaaaatatcatgacagaagtggaagtttatattaattgtggtatcgaaggttctttgagccgctgtaaggaagtgctgaaaagaaacaagattgacattgagaaaatacattttacacaatttgaagatgagcttcactgggctcgtgactatggtccggatattttggttgatccttggggaggcagacagctgattcattttaactttaacagctatggaatgcgtgatacccaggacccagtatccgctctggcaagaaaaattgcaccacatatggccattgagctgggctgtacccacatggtctggtcgccgctggttacggaaggaggcgataaggagtttaacggcgccggtatttgtatttccattgaacgaacagaggttgaaaagagaaatccatcctatacgaaggagcagattgaggcgaagtataaacgactgtttcatttgaagaaagtaatatggatcccagatgcgtcttatgaagatgaagatatctttgacgggccattggaccggatccatgggaaacccatataccgctctttatccgcaaatgggcacattgatgaaatctgtcgttttgttgatgaaactacgatcttgttggcggaagtaacccaggaggaagctgagaaactgccgtcggcaaagatcacaaaggaacggttagacagggcctatgagatcttatcaaaagaaaccgatggcaatggaaagccatttcgtattatccgcatccctgttcccgaacccatttattttgccgcaaagcccggtgattatatctatgaaagctggcagttattcaaaaaggatcttcccaaagacggctgtatggaggatggaacccagttcccagagggagaaatatggatgcagcctgcattgagctactgcaattttttaattgtaaatggcattgtgttaggacaaaaatattggaaagaaggtctccctgaatcagtgaaagaaaaagacaggtgtgcccagcaggtcttagagcaggtatttccagacagacaggtcatcatgatccatacaacagccctgaatatcctgggaggcggaatccattgtattactaagaatattccctgctgatcttcaactgtccagttgaaaatttcaaattgcggagggcctgtataaaatgctgcccaggaagtcttttggaatcattcaagcttccttctaattaccaggagaaggagcagatttaggcagggggtactgtcaaagattgtaaagaaaaccgcaggggcaatggaggccaggatactttccttgtgaaattttaacattttacaaacacaacttaaataaaagagaaataatccttctgtattctttccttaacaaatgaagcataccggcagtgtatgtgaagagaaaaggaaagaaggaaaagaatatgaagaatgatgtgatctatctggtaacaggggcagctggttttttgggaagtcatatatgtgaggaactattgaaaaggggagagaaagtccgggcactggtgcttccaggggataaggccgtaaaatatgtgccggaagcagtggaagtcgtaacaggggatttgtgtgacagggattccctggaggcgttttttgcagttccccaggataaggagacccttgtgatccattgcgccagcatggtaactgttaatccggtttttaaccagaagctcatagatgtaaatgtgggcggtactgagaatattatttacgaatgtctaaaacatccggagtgcagaaagatggtttatgtcagcagcacaggagccattccagaacagcccaaaggacaaaagatcaaagagaccgacagatttctgcccattgatgaggaccggcaggtgggctgctacagccagtcgaaagcaatggcaactcaggctgttttagacgcggtgagaagggacggtctgaaagcctgcgtggttcatcccagcggaatcttaggaccccaggattatgcagtcagtgaaacaacgggcacgataattaaaattataaatggggagatgtctgtggggatggcaggctcctttaatctttgcgatgtacgggatcttgcccatggatgtgtggcggcggctgataagggccgcattggagaatgctacattcttggcaataaggaagtaaccttgaaggaggtatgcaggatgctgaaggagaactgtggctgcaaagaaccaagattctatatccctctgggactagccggaaagctggctgagattatggaaaaacgtgccaagcgcacaggaaaaatgcccatcatgaccactttttccgtgtataatctggccagaaacaacgcatttgatttttctaaggcagagagggagctgggctactgcaccagaccctatgaggaaaccctgcgagatgaggtggaatggctcataaaagaaggaaaaatacattcgctgccatctggaaaagaaagaaatcgaaagcattacacaatactaggctgagaaattaataggatggatgatcgctgtcaaagcttctgtatatgaaagttttgcagggaatccagaatttttatgactgcaggaaagaataagtatggaagtattcagtcatttgtggtaaaatataaaaagaatttgtaagaaagaagggatacggaccatggatagagaagtcttaaactatgtagtggaaaaatcaaaggatttaatgaatgctccaacctgcagccaggagaccaaggcagccgctcaggcgtggctggatgctgtgggaactgaaaaagaagcagaggaaaccaaaaagtatattgcacagctggaaggagatatcatgcctattgatatgctcatcggttttgcagaatctgagggcggcgcccaggtatttggggcagataaggcaaaggagatcgctgcccatgcaagggagatcaaagcagcgggagcaaaatattgcgattgtccagcctgcgccattgtggaggagatcctggaaaagaaagacagccttgtgtaagggatgatttttcattaccctggagcggtccttgcaaggttcagattttaagcgggttctggcactttcaggccaaaagaaatattgaataatgcaggaacagagggtataatagaaaaggaagatattgtaacacgtacaaaccacaacgaaaaggagaaataaaatatgggattagtaacaactagagaaatgttccagaaggcctatgacggcggttatgcgatcggagcttttaatgtgaacaacatggagatcgttcagggtatcacagaggcagccggcgagctgcattccccggttatccttcaggtatccaagggcgctcgtgcatatgccaaccatacatatcttgtaaaactggtagaagcagccattattgaaaatgacattcctatcgctcttcatctggaccacggcccggatttcgaaacctgtaagtcttgtattgacggcggctttacctctgttatgatcgatggctcccactatgattttgagcagaatgtggaagttaccagacgagtggtggaatatgcccatgaaaaaggcgtaactgttgaaggtgagcttggtaagctggcaggtgtggaagatgatgtaaaggtttccgcagcagatgctatgtatactcatcctgacgaggttcaggaattcgtagagcgcacaggtgtagattctttggcgatcgccatcggaaccagccacggtgccttcaaattcaaaccaggccagaagccaatgcttcgttttgatattctggaagagatcactaagagaattcctaatttcccaatcgttcttcacggcgcatccagcgtatcccaggaatatgtgaagatcattcaggaaaacggcggaaatctggcagatgctatcggtattccagaggacatgctgcgtcaggctgcaaaatctgctgtatgtaagatcaatatcgactctgaccttcgccttgccatgactgcaggtgtgcgtcaggtccttacccagaatccggctgcctttgacccaagagaatatctgaaggtaggaagagcaaatgtgaagaccttagttgcacataagattgtaaatgtgctgggaagtgacaacaaagcctgattgattaaaacacaataaggagattttcctgccgccatgtgttagatacacagacggctggaaaagatcagccaagataaggagctgtccattgagttgggcggctccttttggaattaggattttctttttttctcttttatggtattctactaatatgaaatcaaggcggagggaattttatgagtatcatacttaaaaaggaattggatccaatctttgagaccttttctttgctcctgtttgcaaatatggacaactggcgggaggagacgatccaggaattaacacagtgtggattgggaggagagattttttttcagaagcattttaagattgtggagaaatatatccgtacttttgaaaaatacaaggtggggacagcccaggaggatgttttgtgcagaggacagtcggatcatatctatatgctgttgatgaccatggctgtggagaacagacaatacctggagcggcctctggatgcagacccaggtatgctgcgccgtttgatctccttctgtcttgtgtattcagaggaagagtcaggatcggcaaggccggaggatatgccggacctttccagtgacagtgaaatactagattttatggacaagatcaccatcaaagcagaagaaaagtggtatgttctcaagcttttgagaaaaccgggggaatgtctggaaaagcttatggagcttatcaggctgaaccttccggcctttgaaaaagcaagggaggctgtgggcaaacccctggaaaagcttatgagcaggaaagaagtgggacaagacaataagtattttaaaattgcagagacctttgtggacaaccaggaaatctatatttcactggcaatgcctatggtacaggccatcctggtttcttatggataccagggaattctcatggaatatcttaatgggagaaaaaatgccagggattatcccaaggaactggtgatccgccaggccaaagccctcagtgacaagagcaagcttgatattttgtgcgggctgaaggcagctcccaaatttaacctggagctggcagagaccatgggactgtccccgtccacggtgtcccatcatatgaattccctgcttatctgcgattttgtcacagtggagaagcgggacggaaaagtttattattgcctgcaggaggagaacatccgggacttcctgaaggctgtggaggagatgctgctatagtgtctccttttttttacgatgaattacagttggagtggacttgtccgctttgttttaaaatcccaatgaaaaaacaaattcgacttatataaaatgtatttgacaaacatgaaaaagtatagtattttattattatcaaatatatttgaaatacataaaacaatatatgagccgtaagtgctgttgaaggaggagattaccatgaagctctatagccccaaagatcgaatttttcttctgggagccattgtgttaggagggatcacggcggctctgtccgcctttgtttccattatgctgcagcaggtgatcgatgtgtcagtggcaggaaatatcagtggattttaccgtgtccttatgggtactatgatttatctggcagcccttggaattacaggatttttggaagccctggcgggaaagctgcttgtgagaaatgtcactgcccatctcagggccaggattttcaaaggtgtaatgagcagggagccggctgcttatgcatcccagaatactgcagactatctgtcagcccttgtaaatgatgtaaagctggtggaggagaactaccttcttcccctgctgctgtgctctcaaatggcagtattatttattaccaccctgggtatccttttttacctaagtcccctggtgaccttgctgctgattggatttttggtgcttttgtttgcggtgcctgccctgctgggaaaaaagctccaaaagcggcaggatgcctattcagaacagctgtctgcttttacggccggtgcaaaggactttttcaacggctttgaagttatccgtggatattccgcctgtggacatatactgagaagatttctcaagctaaataaagacacggctgacaagaagttttcagcggataagctgatggctgtaaatgaaagcttttcagatattttctcatcgctgattgttattgtgatcgtatttgtttctgcctggcagcttatggaggggaagatcaccatgggcacccttctggctctaatccagctcagtggaacctttgtgaccccggtggtcatgctgctgcagaaccttcccaaaatacagggcatcaaaccggtcatagagcatctgggacagcttatggaaaaagaaaacccagagaaaatacagatggagaacagtgatgacagattacagaaaagcgacaaggggcagggagagcaggaaagccccagactgaaggaaggacttgtgtgttcccatctgacctatggctacagtgaccggaaaacagtactaaacaaattggattttacctttcttcctggaaaaaaatatgcagtcacaggtcccagcggctgtggaaaatccactttgatcaaacttctcaccgggtattccagagagtttgaaggggacatactgctggacaaaaggtccatgaaggatatgggacaggaggagatcaacagatgtattgctgtggtgcaccagaatgtatttctctttgatactaccatccgggataatatctgcttaggggtagattataccagggaggagattcaggaggcccttagagaaagtggaatgactgcatttgtaaaagagctggacaagggaattgacagccaggtgggagagaatggaaatcttctctccggaggccagcgccagaggatcgccgtggccagggcgcttatcagaaaaactccggttctgatactggacgagggcacctcggccatagacaaggacactgcctatgaaatagaagaaaatcttcttgggcaaaaggagctcacgttgatcactatcacccatcatatggataagcgtttgaaaggggcttatgaccagatcctggatctggaaagatttacaatggattcgctgtcacccttgtgatatactgggaaaacaaaaagcagaaggggcacttccggaaaagacggatgttttccgggttgccatcttctgtggaaaaggagcagaaatgacagagggaaagaacaattgcccctgtaaaaggaagaaatgcgaaagatacggggattgtgaggcttgtattgcccatcacaagcggactggcaggcggatggcctgtgaactttcaaagacaaaagaagtacccaatgatacaaagctgctaaaaaagaagcgggaccgatgagaaattttcatccgttccgcttcttttttcaggtcctggggtatatgtctgaaattctttttggcttttgaataaggagatgtatgtgaattcttaataaagtttaaataggaatgcgcctcgacctgtgctgaaagaaatgtttttattttcatcgttgacatggggattgcaagaggaaccctttaccatcattttaaatcaaaggaagaaattatggacgggattatcgaaagacagagtgcccgtatactcgccgcagccagggagattgccggggacagtaccattcctgtggaacagcgtatgctgcgggtgatcatgtcccttcatctggaggaagcccggggaggggcaggaccggatatgatccagcatcttcacaggccccagaatgctcttatgcagcagaaatccaagcggatcatcatggagcaggtgcctggcatattggcaattgttgtggaggatgcggtcaggcagggaatggcagacactccttatcccctggaatgtatggagatggcggttgcctatttaacgacaattctggatgatgaggttcttgagttggaccagcaggagcgtatggaacggatccaggcttttctttttaatttagagaggatgcttggagtgagggaaggacagtttgcatccattgcacaggtgctggaaggtggtaaagaacatgaagaacaccaatagttccttcggaaaatttcttctcctgtggtcaggagactttctatcagccattggaagcggacttacgtcctttggcctgggggtttacatttttcaatacaccgggaaggcttctttgatggccctggtgacacttctggctttcctgcctgggctgctgctgagtgttccggcaggagtactggcggaccgttatgaccgcaggctgctgatggtattgggagacagcctttctgccttggggctggtgtttattttggcctgtcttatgaaaggtgaggcaaagatctggcagatctgtgtgggggtaacggtgagctccgtgtttggctccttgctggagccagcctacaaggctaccataaccgatctgctcacaccccaggagtacagcagggccagcgctatggtccagattgccggatctgccaaatacttgatctcccctgtgcttgcaggctttctgctcaaggcttttgacatccgccttcttttggtgctggatatcagtaccttttttgttactgtgatcaccactctggctgtacgcaggggactttcccatagacaggcagaaggcaggagagctttttttcaggagctgaaggagggctggaaggcacttactgaaaaaaggggcgtattggttcttgcggtgatgggcgcctttattaccttttgtctgggagtggtgcagacgctggcttcacctatgatactcagtttttctgacagctccacactgggaagcgtgatgacggcggcggccctggggatgctggctgccagccttttgctgggaggaatctccataaaaagggactatacccgggtcctttgtatttcccttacaggggcggggatttttatggtgttgtttgggatgagggaaaatatcctgtacctgggaataaccggattcttgttttttgcaatgctgccgtttgcaaatacctgcctggattgtctgattcggaacaatgttgaaaatcacatgcagggacgcatctgggggcttatcagtcttatttcccagatggggtatgtggcggcctatggagtttccggtgtgctggcagactatgtatttacacccttgctgctccctggaggggctttgacacacagtgtggggaagatcatgggcacagggcagggccgggggattggactggacacatatgatgtagatgcagtgcttcaggcatggcagccgggaggatacggggccatttccattggcagaattctcacgggagagatcaatccttccggaagcctgatggatacctgggcatatgaatatgactcctatcctgcccagagtgtggccagcgccagcttcggtaccaatgtgatcaatcctatttatggagaggatatctatgtaggataccgttactttgaaacctttgcacctgaggatgtgcggtatgaatttgattatggtctgagctatacctcctttgattatgctgtaaaggataccgcagtgacagacgacagtgtctccatcaccgtagatgtaacaaatacaggagaccgcagcggtaaagaagtgatccaggcttattacagcgcacctacaggtgtacttggcaaagccgcctatgagatggcagcctttgaaaaaacaccggagcttgctccagatgagagctgcaccctaaccctttcttttgacgtgaacgatatggcttcctatgacgattctggaatcacggaacacgaaaactgctatgtgctggaagcaggagactacaatttctatgtaggtcctacggtcaaggagctcacacctgccggatcttactctgtggatgagctgaccgtgactcaggagcttacagaagtgcttgctcccacctttgccttcaatgtggcagcagcagccaaggacgatgacggaaattatgtaatgaacatgacaaaagcagccttgcgctcagcagacaataaagtggaagataaatgggacacagagttaacctcttatgagctgactggcgaggacaaaggtataaaattgggacatgtggctgatggctcagctaccatgcaggaattcatctcccagtttactctgccggagcttatccagctcttcggcggcatctatggtgtgcgtaccgataattatcattacttccctgattctgcagccggagcagcaggcggaatcggacagactctggacagccggggcgtgaatttctctgttatggcagacggccctgcaggacttcgtcttacgatggatgaggatgacagcggaaatacttatttccccatgggcaccatgcaggcctgtacctggaatctggagctgcttgaacagaccggggctgaaattggcaaagaagctgtgtttaatcaggtaagcgtatggctggcccctgccatcaatatccatagagacccattatgcggacgtaactttgaatactattcagaagatccactgctggccggactttgtggagctgctgtgacaaaaggcgtacagtcctgtaatgtgggcgttgctgtaaagcattttgcactgaataaccaggaatacagcagaagcggtggtgactccattgtcacggaacgtgcacagagagagatttatctgaagggcttccagatccttactcaggaggcggatccttggtttattatgacttcctacaatagaattaacggttcctatgctgcaaccaactatgaattgcttacaacggtactccgtgacgaatggggcttcaagggctctgtcatgacggactgggcttctggaaaggacaatggcaatgccagtatgcttcgtgcccagggcgacctgtgtatgcccagccttgtgggacgtgcagatcccaccttaccggatggctttaccaccaccggagctacagacagctggtacggcaccgtacattccggaaccatctactgtgaatactgtaatacagaatacggggattactccttgtttaaaatcaataacctttatattccggccgcagaaccatgctttgatgaaaacggcgttgtggaatcctgtacccgtccttatgagcaggctgagacaccggtattgccggaaggctatacctatgacaaggattatgtatacgatgcacaaggaaatccaattaccggttattctgaatggcttctggaccgtacaggtctgattactggctatgttgccggagatgtttccttaggtgaaattgaacgctgtgctgaaaacgtattcaacagcctgattctgatcaagggctatcagcctgtacaggaagaaacagcggcagcagcggcagatgcacaatgatctcgtctgtacgatatacgtattggtacatttaataaatatccttcaggtcacggcccggatgggcctgtgatgaaattctgtaaattgtaatgaggattgtcaagaattagtaatttaaagagattgggcgttatcactccaaggagtgacagcgcccaataaatttttttgagaatttctgcaaagaagtccttgatcatgggttcatagagggaaaaatagggagcggccagggaaaatatgttatagaagtcccatgccctccaaaatttccacagctttcggggcgtccggttctgcaatgtagatgtcctcagcgaaaaaggaacaacctgcatataggttcataaagcagccaggacttgtatcctgcttataggcaggaatgttgttgtctgaaaaggtgttcagtatcatctctgcctgtaaattgtcctgggcagtgataatcttaatgattttcggttccgccataatgacacctccaattcttatgaccggcctggaaactgaattcatcagttccggcggttacaataggaatctattgatttttcttaatttcatcatacgctgaaacctaggaaatgtcaactatagtttacatatttggctggaatctccttgaaaatatacatggttcctctattatccatccaggtgcaaaagctggataaaggctctgtgtatggtccgcgcacgcagtaaagccggaaggcgctatacagaatcccatggaaggattctctgcctgcagcgggctgcatttgccacataatcaccttaattcccatcccttacttatagggagcttgacagctttgtggagcaagtaaaaagaccagcggggtggctggtctttttggagaaggtatttctttttatggggtgtagcaaaaactatataatgtattgggggtgatttatttatacaatatttcaattgaaaagtgtgaacaaaaattaaaaaaaatccaattaaaaattgtacagttttaaaaaagctatatttttattgtagatttagctcagaaaaaatcaggagaagaatggataattatgcaaaattgaaaaacgcttattggtatggaacacataaaaattctcattggtaaaaacttcccctgaaaaaaatatatttattctgccagttataaggtggccaatagcatctgtgagtacatggcagatatttccgtgcgtccttgacggatgaaatcaatggcttttgacgggtggatcttaccctggccggtgatcaggtagggaagctcataaccccagcggcagccagcccccttcattggcaggatataggtttcaataaatttcagaacgggaagctccctcactctttcggtgtccacataacccaggagcatttccatggcacagttgccggctccccggcccaggccgtcgtaggtggcatctgccaagcccacgccacaggagagggcttcaatagtattggcaaatgcaagctgctggttgttgtgggcgtgaatgccaatgatttttccgctttttgtcccgtagctctcgtaaagcctggcaaggttccgcagctcctgggggtagaaggctccgaagctgtccaccagatagatcacgtcagctggtgactgacagatctgttccaggaatccgtggatggtatccggggaatcattggagatggccatgatattgatggtagtctcataacccttgtcgtggcagtagcagatccggtcaagggcctgggggatgtcagagctgtaggcggcaatgcggatcatgtccacaacactgtctttcttatctggcagctcttcccactgggtgcggcccaggtctgccatcacagaaattttcataggagtatggttgtcccctacgatttcccgcaggtgttcttcccggcagaacttccacttgccgaatttgttgggatcaaattgctgctgggacgccttatatccaaattccatatagtctatgcctgcctccagattggcctggtacagggcctttacaaattcatcggtgaaataaaaatcattcaccagtcctccgtctcttaatgtgcagtctaaaattgcaggtttcattccaatttcctcctttccggcgggacttaatgttcccgcacatgctcatggcttattgttaaaaaactaccagcagatatttctccttatttggcaagtctcccttgggcgcctccatttcctcacttctctgcttcaactcttcatcccctcacgcatgagggacttggcagctttgtgcgccaacgtgcagctacgaagcagttttcttcttcacatggtgtgcatcccttggaggttttttgttccctgggaaagttcagagaactttcccagggaacaaaaaaccggtgcctgcaggatgcagacaccggtctctaatcgattcatgtgcttggagaataagattattccttcacagacagattccgtatgttacgtgcatcacaacaagccggtacaaaaactttgcgccagctaaaaaagtaaaaatatgcacttgtgtaattacggttctgtgtagtcatgattatcagcctcttagaataaatttagtagttttcctgtattataggtgtgttttgggaaattgtcaatattctttttcgaaattttgtgcggcccgtttgcgagccaagtgtttgagaagcgtcctcaaagggtactgctggccaggaaatgaatcctaagagcctgccgtgttgtggaaataggcttctcttggaatagtgctgaggaaataagtaggaagcttcaaaactatatagcttaaatagcacttgaaaatacggagcatacctgttaaaatttaattgaaccgatggtttaattattgagaacaggagcctcatatgggaaggagaaaaaaagaaccagggagtactcaccgtgaaaacattgccagagctgccgaggggttgtttgtgcacaaggggattgaagcaacaaccatgaacgagatagcaaaagaggctgggtatagtaaggctacattatacgtttattttgcggataaagaagaaattataagtttccttgtgctgaaaagtatggaaatgcttgcttctcacatcgccgaagcagtggatgggcaggcgccggtgaaagaaaaatactataaaatttgctgggcattggtgagttatcaagagcagtatcccctatattttgtgctcgctttaggagaaattaatgtggattttgaaaaggaagattatctgcctttggaaaaggagacatatgaagtgggggagcagatcaatcataaaattgagggatttattcaagaggggatcagagccggagaattgcagccggatattccggcattacaaactgtttttttattttgggccgctttggcaggggtgatacagatgtctgtaaataaagaggcgtatttgaaaaaggccatgaacctatcaagacagcaatttctggaaaatggttttgagaaactttatcgattaatctcaagggaggacaataaatgaagaaaaaattgctggccatattaggaggccctcacgaaaacggatcaacagcggctatgctccgttatgccttggagatagcagccgcgcagggctgggaagtaaccacagttttcctgtatgaaaagaaaatcttgttttgtaaaggctgccgtacctgtatcaaaaccgggcaatgcgttttgaaggatgatttaagtgagatagcccaacgtattaaaacctgcgacagaatcatcctgtccgctccaacctattgggcgaacgtgcctgcggctgtgaaaaatttatttgaccgtctgttagggacagcgatggaggaaactgcaaccttcccacgtccccgtctatccagaaaacaagactatttgcttatgacagcatgtaataccccagctcctttttcgtggatctgcagacaaagcagcggagcgctgggtgcaatgaatgagttttttaaaacatctggtatgaaatgtattggaaccgtaacgttttccaatgcaaaaggcagtgctcaattgccgcgcagagtatcaaagaaaattgagcggttattaaaataacggatgagaaaaaagggagaagctgaatgatcgctgtacgtgtctccctcctgtaaaggaagcaaaaaggcagttgaaaatgctttaccaaaatggtcaaattgttgtggagaaatccatactcccagttaaggatttattttcaaagagattgggacagtataaaaggaaaatcagaggaattttaaggggtaaaaagatatgaaccatttgtttatccggagtgtgagtattgactggaataagattgaggagaactcctatttgcatagcatagaggcacttaaaagcatgcaagagctggagttccaaaagaatattacgttttttgtgggggaaaacggcacgggaaaatctactttgatcgaagcgatcgcagtggcttatggttttaatcctgagggaggaacaatgaactacagattcagtacattcaatgatgtgtctggattaaacaatgcaatccgcatggtaaaaggataccgccgtgggagatcaaattattttttccgtgcggagagcttttttaacgtggccagtaaagcagaggattatcgggacaccactccgaaggagctttattatgaacgatatggagggaaatccctgcacgaacagtcacatggagaaagttttctggcatattttcaatcctttgtccaggaagggctgtatattatggacgagccagaggcggcattatcgcctcagagacaattgacattattaattcaaatatctaaaatggctgaaaaaggttcacaatttattattgcttcccattcccctatcttattaggaattcccggagcggatatcctgtcttttgatgatggtgcgatcaggcgctgcagctatgaagagacggagagctatcaggttatggaaatgtttatcaatcacagggatatactgatagaacgtttgctggatgataggaagaggatgtgaaccatagagaaacaaaatgcggaacgctgtcagatggcgctccgcattttgctttccatacctgcaaggcttctatacaatctcaaatccattggccctgtacttctccagggttttttctttgatctcagagtcagtgatcaccaggtccacatcgcagccatcgcacacatggatgaaggtgactgtgtcaaactttgtatgatctgccagaatgattttctgctgggaagaattcagaaaggccttcagcatggaggtgccttcaaagtaactttccgtaaagccctcccggatggagattcctgcgattcccataaaagccacatccagattcagacttttgataaattcaatggcctgttcgccaaagctggcatgttcatcatggttataaattccgccgcactggatgatggtgtaggaatgcatatcagacagagcggatacaatttcgttggaattggtaaccacggtgagattattaaaatgttccttgagggctttggcgaaaatcaagcaggtggtggaatagtccagggcgatggagtacccttcggatacataattcaaggccttctgagcaatttcttccttgaggtggatgttggcggtggagcggatattgaagaattcctgggaggtatccagcttcaccagagaagctccgccccgcactctttttaataatccttctttttcaagatattccagatctcttctcaccgtttcactggatacgttaaagtggcgcataagctgagccgcctgaatggtacgtttggttcttaaagcttttagtatataatcgtatctttcctgagcaagcataggattacctggcacataataagggaatgtgggattctgtggaaaaacatgtgattatttttttctagatccggaaaatcccttattgatgaaactgccatcctttctccaatgatatttactaatagtatagcccagttagaaaaattagtcaaatgcagttttgtgggaatatgtgtgatatttgtgcgattctgtggaaatatgtgttgacatgtgtgggaacatgtgctaaattgtgagtataaagacagataataaaatgtaaacactgaaatatataagaaaattaaaaaatagaggacagtagtttgattacaagtgtaaaatatccatacttttacactacagttatacaagtactgttgtttaccatatgccagcagcagagccgccccatataggggtaaagcctgggaaatgagatttttttctgccgcccgcacagaacagagctgtcagaactttggaaatgttgctccccagaagggaaaacataaaatttatcaagaaagagaggtagctgcaatgatgagaaaaaagatgttaaggaacgttgctttggtgggaatggcgggggtgcttgcggcggggcccacagtgtatgccgcccaggacagtgggaaaggcattgacgaacccatagaattattgggcgttgtcatgaccatggaccacaccttccagcagcagatggccgccggctgggcactgcccattgaatacaatgggcaagaggtaaaagtaaatctccatgtggaagaccctcagggggctattgagaaagaaattgaaattacagagacttacatgaagcagggaattgatgcatggatggggtatcccctgaatgcagaggctatggctcccgttgccgcagaaatgaaggacaagggcatttatatgcttacggagggcaacaacatgcccggcgaaaccatgggcatggtgacagatgagcgtgacggcggacttttgggcggagaaatgtttgtgaaatggtggaaggagaaccgtccggatgacaagccctatatcctggtgctggatgatcccacctcagaggcattccagagaaagccagatgcatttgtggagtatgtaaaggaaaatatgcctgaggcagagatcatcggtcagcaggatgcggatatggaagtggaaaaggctatggatattgtatccacctacatcctgagtaatccggaaatgaattttgttttctgtggtgtggattccaatgcagtgggagcaatggcagccattgaaagcgcaggacgtacagatatttccgtggcaggctgcggcggagaggataatattcttccctatatgtaccaggatctgtctgaagaaaagggcggatatgtctttgaagtagcttatgaaaagtcgcccattgaattgggatatcttatgcttacaggtgcagtacagctggttatggacccggaaaatgcagattataacatcatcgatctgggctttaccgctcttacaagagacaatctggatgaatatgtggcagacaaaaatgagtggttggagaagattggagaagaacccttggacttcacgaaataacctgggaaggaaggagcgctatggagaacaaagaagtactcagattagagaatatagcgaagtccttttcctcaaattatgtactacaggatattgaattttccctgaaaaaaggagaagtgcgggctctggtgggagagaacggagccggaaaaagtacaatgataaagatcattgcaggggctttgaaggctgagagcgggacgatttatctggagggaaaaccagtacagtttgcctcacccaaggagagtctggctgcggggatctcagtcatgtatcaggagctggatctgcttcctgagctgtccattgcagacaatatttttcttggcattgagaaaaaaagcaaatggagaaccctggaccgaaaacagatgggggaaattgtagacacacacctggaggaaatgcacctccaggtgaagaaagaggaaaaggtggggaaactacccatcgttgcccaacaaatggtggctgccatcaaggccattgtccatgatgcgaaaatcctgatcatggatgaaccctcctcctccctgaccagcaaagaattagagattctctttgacctgatcagaaaactaaaggaaaaaggcctggccattatctatgtatcccacagactggaggagattttccaaatctgtgattctgtaactgttttattaaatggccggatggtatccacctccctggtggggcaggtgacaaaggaacagatcattgagcagatggtaggaaagaaaataaatgaaaaccgtctgaatacaagaaaaagctatgaaaatacctatgtgctggaggcagaacagattcacagtaaatatctgaaggatgtctcctttcaggtgatgcagggagagatttatgggatcctggggctggccggctccggcgccattgaattgggaaaggtgctgtatggagtccatagggttgagagtggctgtttgaagatccatggcaggcctgtggagctgaaaagcccctggaatgctttgaaaaattccgtctcctatgtatcagatgaaaggcgtgcttatggaatatttcaagagatggacgcagaagaaaacggcatgatctcctccctggagaactatgtatccttccagcctctgctgttgctggagcataaaaaaatgcaggaacaatttatggagtatgtaaaggagtttgccataaaaatcgaaggaccccagcagaaaatccggtacttaagcggcggtaaccaacaaaaaatattgatcgcaagagctctgttaaatgacacggatattattgtgttgagctgtcccacaaaggggattgatgtgggggcaaaatatgaaatctatcaaatccttttagagtgtgcccgcaagggaaaaaccatccttgtggtatcccaggagatcacagagctggtgcagatctgtgacaggatccttatgttaaagcaggggaaagtatataaagaatacgccaaagaggatatcagggaaagcttaatttatcatgagctgctgcaataagaaatgttgtcaggaggagaataatgtccataaaaaaatttttcaggaagggaaaagggctgggaacggttttggtctttgtcatattatttctgtttttctcagtgttttccaggaaatttctcaccattggaaatcttttgaatattctgcttcaaatttccaccctcatgatcatttccatgggtatgacctgggttatcatctcaggaggaattgacctgtcggtgggcgcgtccatggccttcagcggagtggccacagccatgctcattaaattcgccggagtgcctgtggccctgggcgtcctcataagtattcttatcagcggttgcattggagcagtcaatggtgtaatgatcacgaaagtacatattccgcctctgctggctaccattgggatgtcttcggccatccggggcctggcatttatcctgtgcggcggggataccatattcggtctgccggacagttttacggttctggggagaggatacctgggaatcgttcccatacccgtgttgatcgcagtgggaattgtagccatatttctctttattcagaataaatccgctttttctatttatacctatgccattggaaacaattcggacagtgcctatctgtcaggaataaagacaagccgccatgtgatcagtctttatgtgatcaacggcctgttggtggggctggctgcttttatcaatgcttccagaaccggtgtagggctggcaagcacgggggagaatatggattttgatgtggtgacggcagtcgtgcttgggggaaccagcattgcgggaggaagcggaaggatcgcgggaacagttttagggtgtatcatcatgggagtccttgcaaacggtatgatgatcatgaatatgcacagctttgcccagcagtttgtgaagggagtgattctgctggtggcaatcggagcggaaacaataaggatgaagcgtgagctgtagtgcgttgtaaaggagaaggttatgaagatactcataaacggatgtggatatatcggtaaggttcatttaaagtccatttgtaactatgggctgtgccagacagccatcagtgatctggatcctgagcggctgaaggaaaccgcacaggagtttcagattacggagacctatcactctttggaggaggcgctggagcatccctttgacggggtggtgatctgtacgcccaatgccgcgcacaaaagcgatgtggagaaatgtctgaaggcagggctgaacgtgatggtggaaaagcctgtcagccatacccttgcggcagcggatgagatctgtgccctggaaaaacaataccaaaggtttgtttttgtggcctactgtctccggtttgcccctgtgtacaaaaaaatcaaggaatatgtccaggcgggagccctgggcagggttttcggaatccgggcaagtgtggcagggaaaaaagccatcacagatgcaaaaaccgactaccggacaaagcgttgtatgggcggaggggtgatcagtgatttttctcatgaaattgattattctctctggtttgcagacaaaaaggtgcgaagggcccagagtgtaaacaccagcgtgatccataaggactgggacgtatccgactgtgcggagcttttacttacctgcgaagatgacttgaccatttccattcatatggattttcttcagccctattttggaagaagtattgaaatatatggtacccagggggctatccgctggcgggacaatgaggcggtaaaaatttatgaggaaaagaccggacaatggaaggaagagaaggcagatgtgaactgggatctggtatatcgggatgaaatggtccattatctggaatgcctgaaagcaggaaaaaaaccattggtggatgccgcttgggcaagagagatcatgaggatcgtccatgaatgcaacggttaatggaaaggaaaagcccttgagacgatggcgcataaaggcgcctgctaaatgaaattaagattggagaagagcttatgtcagcatatacaggaaaattagtgcggttaaacagaatgtttgatgagacaggtacatgtattattttcgcaggctgtcatcagatgaccagccatgagatatatccaggtcaggcagacgtggtggaatcctgccgcaaggccctggaaggcggggcaacctgtgtgaatatcggaaaaggatttaatcagaaggtgatccccgtactgaagcggggggcctcgatcttaaattacctgccagtgtatcctgcctacagcaagaaaaatccctatgaaatgatcgtcaccagcacggtggaggaggcggcagtaaacggggcggacggcctggtgctccctgtggatctgtatggggagacggcaggagaggccatgaagaccattgcggcctatgtaagagagtgtgagaagtatggtctggtttttacagtggaagcggagtttcctactttctatacttccaatgatgagaacattgaaaagtatggggcagagtatctgatgttttccggccgcatttgtgcggagctgggggtggacgtgatctccaccaattataccaacagcccggaatcattccagaagatcattgactatgtaaagctgccggtgctgatcaacgggggaaccaaggtaccggaaaaggaatttttggatatggttgagatcactgccagggctggagccagaggctgtctcattggcagaaatatctctgaatccagggaccctgttaaaatgaccagagctatcggagagattttccgaagagggatcacatccaaggaagcatacgcgatgctggattagaagaaggtgaaaaaatgagcagctattttgttggaattgatattggctgcgggggagccaaggtctgtatcataaatgaagaagggcaggttctggggtataaatttaaggaacatacgatcacggtttcccatgggacctggtcagagaccgacccagatgaatattgggagaacattgcagggatgctggatgccttggttaaagaacagcatatggatacaggattgatacgggggatcagtgtatcctccgctgtcccagccattgtcatgcttgataaaaacggtcaggtcatagaaaaggcatataattttctggataccagagcagcagatactgtggaagaaatgaaaaaaatggttgataaaaaggaatgctttgaactcagcggatttaatctggacgagcagtctacagtgaccagcatgctttgggaaaaggctcacaggccggaggtttacagcagaatttacaaggttctcaccccggatgcctatgtgaccttccggctcacagggaaagaacttgtgaactattctggaggcaacttctatggaaccatctttgacatccgcaaaaagcagtttgatccggcgatgtgtgaacggctgggaattgacatggaccttcttccccaggtattcccctgtgaggagatcatcggggaagtcactttagaggcgggcaggaaaacaggtctgaagccgggaacaccggtgatcgcaggcacagtggatgcctttgccggatggctggcaggcggggccattgagcctggccagatacagttaaacctgggaactgctgcagtgcttggggtggtgaccgggcagccccagtttgtggaggagctttggaattgtgtatacccggtgaattccagaaattcctatgtgatcttcggctccacaaccaccggagggtatgtgatgcgccatctgcgagacaatttttccgcctatgaaaggtttgttgagaagacaagcggctatgattcttatgatcttttgaatctggatgcacagagtaccccgccgggggctcagctgctgctcaccctcccccattttatgggagcccgcacaccggaatttaaccgggatgcaagaggggttgtctttggctggggaatgaatcacaggaaagggcatttggtccgctctatgatggagggtgtggccctgtctgcctatggtcagtactgcgccatgcaggcagcagggattcagaccaagggtccactggtgatgaatgaaggcggagcaaaaagccgcctgtggaggaaaatcttcacagatgtatttgaccggcccacggtcctgttgaagaacagaaccggtgcgccgtttggaaatgcggtgctggcaggggtagccaccggctggctttcggatttttccgtggcaaaggagtgggcggagtacgtggattatcaggaaccggataagaaaaaccatgagctttacatggaactctatgagctttcaaaatccatctatggacatcttcaggaggattatgaacgtttaggaaagctgtacaaaaggtatcagtgaggagtgggagaaatgttaaaggattttacgtttacagcccgggatctggcggactatcaggaagaattccaggagcggctgccccataaaatgattgacggccatgtacattgctgggaaaaatcctgtctgaaaatctccagagaggagtatgggatttataaggattataagccctggacggattttgagtttatggaggagtttaccctggaggattttgcccggtgctttcgtacccttttgccagggaaggagctggaaggaatctttttcgggcttccttttccacagattaacagagagaaaaacaaccagtatgtgtgcaggaaggcacaggaattccatgcagccttttattatgtgccgggccagtatgaggacggggcagaggccctggacagatatgctcttctgaaacagccgggcttcatggggtggaagccctacccggatctggtggaggggatccagggagagatccgtattcaggacatgctcaatacgagttttctggaggcggcacaggagaacggtctttgtgtaatgcttcatcttcccggtaaacagaggctgagggcacccctgatccgcagggagcttctggagctcaccttgaggtatcctcatgtaaaatttatcattgcccatgcaggcagggccttttgctataaggatatagaggggacgatcgattttcttcttcccagagagaatgtgtggtttgatacagccctcattaatgacccggcagtgcttttgtatctgttggaaaaggttccggcacacaggattatttttggcacggatgcgcccctggctttttcaaggggaaaggatgtgtgcatcaataaccgtcattattatgtttcgcaggaacccaggccctggggcttggggccgggaaggccggatctgctccagttgagcttttatctctatgaggagcttcgggggatcttgtatgcctctaaaaaagtgtatggcagggaggaaaagaaggctctggagcagattttttatggaaattcagaagcgatgagaagggaacggggactgtgataaggagggacggatcatggaagtgatcattggatgtgacaatgcagcggtaggcttaaaggaagcggtgctggccgtattagaaaagaaaaatatcaccgtggaggatagggggtgcttttcccaggaggatcccacgccctatcccataatcgccagaagcgtttgtgaggagattgaaaaaagcggctttcagaaaaaaggaatcctgctgtgcggaaccgggcttggaatgagcattgcggctaataaatgcagagggatccgggcctgtgtgtgccatgacatttattctgcagaacgctctgtgctcagcaacaatgccaatgtgctgtgcatgggcgccagagtgatcggtccggagctggccaaaaggattgtggaaaaatggctggagctgaaatttaaggacggaccatccacagctaaaattagggaaatctcaaaaattgaggatgaaaattttaaagagggctgagggaaaaacaaactgaccactaaaaaatactataatttgtatattttgaataggacagaaagtgctataatggtgctcaaattcatttaaagaaaaggagagagtaccatgaggaaaaacagatacgaatctaagaaggaactggaacagatgctgaaggggggcgtgatcatggatgtgaccacaccggatcaggctcggatcgcccaggaggcaggggcctgtgcggtgatggcgctggagaggatcccggcagatatccgggcagcagggggtgtttccaggatgagtgatccgaaaatgatcaaggggatccaggaggcggtgtctattcctgtgatggcaaaatgcaggatcggacactttgtggaggcccagatcctggaggccattgaaattgattatattgatgagagtgaagtgctttccccggcagacgaccggtaccatattgacaaaagtcagtttcaggtcccctttgtgtgcggggcgaaggacctgggggaggctcttcggcggatcgcagaaggggcatccatgatccgcaccaagggagaggcaggcaccggggatgtgatccaggcagtgtgtcatatgcgtttgatgaacggggagatccgcaaggttcagaaccttcgaagagacgagttatttgaggaggccaaggagcttggagttccggtggagcttcttcaatatgtccatgacaagggctgtcttcctgtgatgaattttgccgccggaggggtggccactcctgcggacgcggcgttgatgatgcagcttggagcccagggagtctttgtgggctccggtatcttcaaatctggaaatccggctaaaagagcggccgccatcgtaaaggcagtgaaaaattatcaggatgccaagcttctggcagagctgtcccaggacctgggagaggctatggtgggcatcaatgaacaggagatccgtattcttatggccgaacggggaaagtaagctgccagatattttggataaaatctcagagaaaaggaaagaattttaataaaagctggtagacgcagatttgttcttccgctataataaaagaaatttgtcggaaattggaaatcacttccattttggacaaaattttggattaacaagacaagaaagaagagaagagtgaatatggtctacattgtgttgattttaggatttttgttgttgattaaaggagctgactttttcgtggacggaagctccaatgtggcaaagcttctgcgggtgcctcccattatcatcgggctgacggtggtggcctttggcacaagtcttccggaggcctctgtgagtatcactgctgccttccaggggaaaaattctcttgcggtcagcaatgtgattggctcgaatattttcaatcttttggttgtccttggggccagcgccattgtgcggccggtatatgcgaaggcttctgtcctgaaaaatgaattccccttttctatttttataaccatggctttgctcatatgcctttgtcttcctgctgtgttcagcagcagaaaggaatttgtgctgggaagagtggaaggcctgcttttactgggacttttcgccatctttctggcatccacggtgcgtcaggctttaaagagccggagggaggagcagattgagcatgggaagaacaagacgatttcccctattaaaagtatggtgctcatcctcatcggaattgcggggattgtcattggcggagactgggtggtggactgtgccagtgagattgcccgcagcttccatttaagtgagacctttattgggcttaccattgtagccctgggcacctccctgcctgagctggtcacctccatggtggcggcaaaaaaaggagagaatgacctggccgtagggaatgtggtggggtccaatatttttaacattctgctgatcttgggggcctctggttccctggcgcccattacggtggagatgacggcaatctatgacacaatggtgctgatcactgccagcgtccttgtgtatatctgtgcgctaaagggcaagtccgtttccagaggagaaggaggcatgtttttgctggggtatgcaggttattttgtttatattctcctaaggtgacagagagggggatttctgttttttccagggtatggaagagaactttgtggtcagccattgtctttccacacaaaaaaccttatgaaatttttgaccgttcagatataggattcgacaaataattatcatataatgtgtatataaatggagaatgtgagtctatctggagctcaagtcaaaatgcggctgtaatattatcgcagtcgcatttttttattacatgggaaagtcctctgaactttcccatgtaataaaaaaactccgggggatgcacataatgtgcaaaggaaagctgctttacagctgcacattggcgcacaaagctgccaagcccgctttgttcttaaagacatacgaaggcttgcccgctttgttcttacataatatcattaaagaagtcttttgaactttttcatacagggttctttttcatacggaaggagagatgatatgggtgttacggtagaggaattattaagattgccggcactgagcatggccacggttgcggccggccacagggggctgcagaaagcggttgcgtctatttccgtattagaatataccgatccgtcagacttacaggaagagtttttaagacggcagaaattccgcaggggagagctgcttgtcagcggattcatcagtatcaaggacagtgtggaggaccagtgtacagtaatacgcagactgcacgaggccggggaagtggggctgatcctttactatattggaatctttgtacaaaaggttgacccaagggtgatccagctttcggacgaattggagtttcccttgatcatcatgcctgagaagcgtatggatctgcagtacggatcagtaatttatgaggtcatggagcaaataacaaaggaacagatgacagattccaaccttgtgggggaaattttggaaaaggtggcctttcttccgtcctatcagcgaagtatggattatgtgctgaacctggtgagcacaagaatctcagcctccctttttctcattgatgaaaagttccgtttggttaattgtgctctggcacatagggagggacaggagctgtttgaacagctttgtgactattttcagagagatgtggacaggcttcccacagagcccagggatgtttttctggaccgaacggtgagtgtgaacaggcagaaggtgaagagcggcagtcagggtgcgctttatctggttctggccagggagagcgcgatgcttcccagagggttgtgctggcaggtggcagagattgtccagctgtatatccgtgtttggagccagggccatggggatgtgggccaggatgaaatgctcaaggccatcttaaaggatgagcagtccaagattcagcgtctggcggagagcatgcagattgatataaatggaatccatcatatgatcctgatcctgccgcagaatctccagaagaatgttgcggtggaggactggaaccgtgtcatagacaaaacaaagggtatcttagagaagaactatcttttaagtctcagcggcatattcgacaattatctgatcatctttactggtgaggaaaatataaagggtatttaccagcagatcacggatgctcttttagaggaactccgggcggaccaggagaaatggaccatggttctgtgcaggggctttgcaaatattaaggagctgcgaaatggttttatagaatgtaaaaattatatcaaggatgcgaaagtgatctaccctttgaaaaatcctttgacttatcaggaaattcaatttgcgggaaaatgcagaagaatcataaactctggggaagagtccatggatctgggctttcagcccttgaaggagctgggagagcggtggaacagcgatctgtacaagactctggaaacctatttcctggatgcagatatgagcattgtgaagacagcggagcttctgtatcttcacaagaataccattaaataccggatcgcaaagctgactgaagtgttccattatcggatcaacaaaatgccagaggcctatgagttgtataaggctgtggcagtgcggcgtcttgtgaagaaatactatgacaaggccaagaattagccggcatgattctggcggttatgccggaatgttatctccataaatcatataagttcgcagaagagaggattgactttggtcagtcctctctgaatttctgggaggcgcccacaggggagatccactgcttccggtacaaggccggtgaggtcttcagactttttttgaatacccggctgaagtaatattcatcggaaaagcctgtgagggaggcaatctcactcagggtgagctgggtggtggccagaagctgcttggcctgctccaggcggagctggttcagataagagaagatggtagtgccggtgcgcttcttgaaaatccggttcatataatcaaaattcatggaaaaggtttgttccagaagctggctggtgatcttctgactgtaggatttatggagataatccagaagcccgttggttttctcgtacatggcgctgctgatgtccatctgggagtgcaggtaggtggaatccatccaggcctttgacagaaggctgaagatctccataagccggcaggaggacagaagcttgtagtgcatccggcggctctggctgcaggtgacggcttcctggatgagcacctgaacattgtgtaccgtgtcaggctgttccatatgaaaatatttggggaccagcacaggaagatccttatatagggagtgggccaggggagattcctgataattcagctccagaaaatggcggatctgctcctgctgccaggaaaggccggcattttccgcaatggtgacaggaacctgggaaaaatggaaaaaggcgtaagagcaggcgccgcttttgtatcccacatgctccctgcctgcctccagaaggaggacatctccgggaaccagatggtagaaatgcttattttcctccagaaacatttctcctgtctggatcacgtacaggatgtgttcgtccgtggtccgccggaaatgcttccagttgtcctctgtctggttatagccaatataagtaatatgaggcaaggtgtcctcagggaataaataaaaggtattcaagtccagttcctcccggtcatactctgaatttctaaagcatatcatatttctttcaagattacaataagtcgccaaagtacaaaaaaatatctcctggctccattcacaccaggacctgacgggtctatactctagaaaaacaaggaaagccaaatatgggtagcagccatggaacagaaattaagaagacgggagatcatcagctatggaggcggagattttgcctgcggtatgatctataactttgttaccacctatttattttatttttattcggatattctgcatctgagtcttcctgctgtgagcatgatcatggtagcgggaagaggactggtggctgtcatggatttctttgtgggaatgctggtggacaggacccatacgaaatatggcagcatgaggccgtaccttctatggtttttcatccccctgggaattctgctggttcttatgcatacagcagtggatgggggaccgggagtgcgcacagcctatgcgttggtgacctatgtgctgtataactgtgtatatgcccttctcaatgacccttataccatgcttatgtcaaccattacagatacacagagccagcggatgcggctgaatgtgtccaagatggtgggtagcagtgtgggcggcatcctggtcatggcaggcacccttaccatgacggaattttttcagacctgtctggagaaggcggggatcacaaagatcctgggaatttttgagatcaacgggtttaccctcacggcgcttctttatggggcggcggccatggtgtttttgtatttctgtttttccaacacccgggagagggtggggaataccaattcggccatctctttgaaaacagcctggaaggcggctgtgaaaaatgtccattggatccttgcccttgccattggttttctggtaacaatggcccttaccaccaaggtgacggtgacggtgtattatgctaaatatgttctgggaagcgcttccgccagcaactggatccttaccctgcatatgggcgcctctgtggctgcggtgctgtgtatgcccttcttttgcagaaagctggggaagcgggggaccttcttaatagacgggggcctgtttctggcagccagcattttcttgtgggtgacggcacagaaccggggagctttttatttctgggggactcttggcagcttttttttgatcatgctgaacaacctcagcgttttcattgtgtttgacaccatagactatacccagaggcaggagaatatccggcccaatgggtttatgttttccatatattgtgtgattaccaagatcagcatggccctgggggcagccattttttcatggagcctggagcggtgcggatatgtggcagaacaggtacagggtgcatcctcccttttttgcatccggctgttttatattgcagtgccctttgctctggtggcagtgctggtcctggtaagtagtttttacagactggagaagtgggaacagggggttttgggagataattctggaattttgcacgaaaaagctttataataggcacatgcttttttgttgaggtgatgatttttgataaccattaaagaaatagccaacgcggcaggagtgacccccaccacagtctccaatgtgatccacgggcgtttaaataaggtttccccaaaaaccctggagaagattcaagccattctaaaagaagagaattatgtgcccaggtttggtctgaatgccctcactaaccggggttcagggattatcggggtccttattaataccccggattttgcagaaggcacttcctttgagcttcccttctatggaagcgtgatcggaaccctggagaatttgttccgggagagaggctattataccatgattttttcctccaaggatgtggaggagatcaccaagatggccatgggctggaatgcagacggcatcattgccgtgaccataccggaggagacggtggactccattgaaaaaactaccaaaaagccggtggtatccctggatatggacgagttggacgagcacctgattgaaaaacattatggggtcatgtccatggactataagggtggacggatcatggcagaatatctgctggactgcaaggtggagaacattatctacatatccaatacgaaaaaaggtgcggaccttcgcaggtattggggagccagggatgtataccgggagcggagagggccagatgccagaatgaaaatggtggtgctgccacacaattaccaggaccgactgaaaatatatgattccatgagaaaagaggctgggaaaaatacggctttgtttttctgtacagatctaaacgcagtggaggcggtgcgctattttcaggaaaataaggttatggttccggcggatatttctgtggtgggatttgataataatatatttgcaaagctgtgtcagccagggcttaccaccatcaactgtgatggaagggataaggcagacgcggcgggcagaatgctcatccggctcattgagggcaagcccatagggaaaaaaaatggagagaccgacgtgtacctggttgagcggggaagtgtaaagaagcggcggtaaggagtttgaaaatggaaagaattaatatttttgaaaatggaatttatatggttttggagattgaccaggagcaggaggtgaagcttcttcatttttcccatctgccctttgaggaggacagtatccgaagtccccaggagcgccgcggctttcgtcttgtggagctggctctctccgggtatgaccggccagaagagcgccatggtatcaaatatactgtgacggccccaggctatcggctgaaatatgacagtcacagggattacaaaaatgacacgggaagaaagctggagatcgtcacctatgacccggagacaaaggtgtatgtcaccagtcactttcagttctttgatgggatttccgtggcacggacctggacccaggtggagaaccggggggaggaagcccagggaatggaatatgtatccacctttaatttaaacggcctggccaaggaaggcatccttgaacgggatgataagatgaaggtggcggtgatccacaattcctggcaaagagaggttcagtggaaggaatacacccttccccagctgggcatccagcagtgccagccccaggatgccacccgttcctccaaggccattcacataaccaatacgggaaactggtccacaaaggaatatcttcccatgggatgcgtgaccaatgaggagacaggaagctgtctgttctggcagatcgagcacaatggctcctggcactgggagatcagtgaccagaacaaccatttgtatcttcagctctctggccccacggagaatgaatcccactggttccggtggctgaagcccggggataccttcgtatctgtccctgcgggagtgggagtatccagagcaggggcccaggagatgatggcccagctcactgcctacagaaggaagatccgcaggcccaacaaggacaatgaaagcatggcagtgatcttcaatgactatatgaactgtctgtgggcagagcccacaacggagaaggaatttcccctcattgatgcggcggcagagatcggctgcgagtatttctgtattgacgccggctggtatgcggacggctactggtgggatgaggtgggagaatggctgccttcgaaaaagcgtttcccaggaggcattgaagaggtcatttcctacatccggaaaaagggaatgatcccgggactgtggctggagctggaggttatgggggtgaagtgtcccaaggtgaaggacctgccccaggaggcctttttccttcgtcatggcagacgggttcatgacagaagccggtatcagctggatttcagacatcccaaggtgctggagcatgtaaatgaggtcattgaccgtctggtgggagagtacggagtcggctatattaagatggattataacattgagcctggtattggaacagaggtggatgcggacagctttggagacggtcttttggagcatgagagagcctacctgaagtggctggacggggtatttgagaagtacccggacctcatcattgaaaactgctccagcggcggccttcgtatggattatgccatgctctccagatacagcatccagtccaccagcgatcaggagaattatctgaattatgccgccattgcggccaatgccccgctggcagtgaccatggagcagtccgccatctggtcgtaccccagaatggagggggaccgggaggagacgattttcaacatggtaaatgccatgctcatgagaatccatcagagcgggcatatggcccagatcagcccggaccgcagggccctggtgaaggagggacttgattattacaagaccatccgccaggacatccgtgaggcacagcccttctggcctctgggattttccgattttaccaaggactggtcagcacttggacttcgggcaggaaagaaaaattatattgccgtgtggcatcggggaggcagtccttacgcagagctcccggtgtctcatttggcatgtaaaaagtgcacaataggcgtggcttatccaaaggcctctccagaagaatgtacgtggaatgaagaaaaagggaccataagtgtacgtttgccaaagactcctatggctcggatcattgagatcacagagtgttaaaatgcttgaaaaagggctgatttactgggaaaatgaatcctcagaagatcagtctttttttgttggttttgtcaggttttgaagaaaacctacaaatttgtgcactttgtagagggaaaaactattgaagttgctggaaacttgtattataatatgaattacaaaatacaaatttcccagagggaggagggatttgcgtgggacgtaaaaataaacaaatgtttgaaaatttgttgtttacgattccatcaattattctggtgaccattaccatctatatcccgtttgtgatgagtggatattattcacttacaaaatggaacggtatttcaaaggcaccagtttttattggtcttgaaaacttcaagaatctgttcagcgggtcatcgactttcatgcagagcatcatcttcacaggaaaatacacaattctctttgtgatcttttccaatgtgctggccctggcaatcgcagtcgccctggttcagaagatcagaggcgccaacctgatgagaggaatgttctttgttccttacatcatgagtatgacgatcgtaggttttatctggaaattcattttttcccaaggattcgccgctctgtacaaagccacagaatggggctggctgaatttaagctggctgggtgattccaagctggcattcttcgcagtaacctttgtgggcatctggcagcagctgggcttttacattgtactgtatatcgctggtcttcaggctgttcccaaggacgtgctggaggctgccactgtggatggagccacttcctggaagagatttttcaaggttacgcttcctctgctgggaccgtccatcacaacctgtatcttcatgtctctgacaaatgcggttaaggtcttcgatattattctggctttgacaaagggaggccccggcggttccacctacagtgtcaccctggatatttaccgggaggcattccagaataacaattacggacttggctctgccaaatcgctggtgttctttgtgatcgtactggtggtaacccagcttgttttgaaattcatgaatagcagggaggttgatttataatgacattgaagcagaaaaaaaatgcaaaattgatcatcctcaccgttctcatgttggttctcgctgtggtttatgtgtatcccattgtgctgatggtcattaactctgtgaagcccttcaaagaagtggtggtggatgtgatcgcactgccaagcaagctggagtggaaaaactacagctatgtaattgacaagatgcagtatggaaggctgttcctgaacaacgtgatgatcaccgtcatcggtgttaccggaatcgtattctttgcttccatgtccgcttacataatcaatagaagaaaaggaagatattcttccattgcccgtctggttctgatcacacctatgctgatccccttccagaccatcatgatcaccctgttgaaggttatgaatgtgatcaatttgtcaggaagcagagtgggccttggtattcagtactggggatttggaattcccatggcggcatttatcttcggaaactttatgtcgaccattccaaaggaaattgacgagagtgcgttcattgacggtgccagcaccttccgcacctaccgctccatcatcttcccgttattgaaatcagtgacttttactgttatcatcctggatgttatgtggatctggaacgacttccttctgcctctgcttatggtcaacagctccaaccagaccaaaaccttggtgctggcagcctacacctttgtgggacagtttaacacccagtggcactacgcaatggcagctatgactctggccgtactgccgtccatcattatctttattcttctgcagaaatacatcgtggaaggtgttgtggcaggagcagtgaagggttaagtcggtatttttctgctgctgggggcagcagtgaaataaaacaaaaaaattataaaggagaagtgaattatgaagaaaaaagtggtaagcattttgttaagtgcggcaatggttatgggaatggcagcaattcctgcaactgccacagaggtaaaggctgacgaaggcgaaatctatatgtttatttcccagcctgagtatgcagacgcgatcactgagctgatcgaagagtacaagaacgtagaaccggacgtgaccatcaattatgagacaacccagaacgactatcctacattattaaaagcaaaattaaactccggagaggtaccggatatcttctcctccacctccggaaaggaaatcgaagtttacaaagaatactcggaagatctcacaggacagcctcttatggacgccatgctccctgcagtggctgacaccatgaaggatgcggatggaaacggatgttacggcatcgccatcaaaggcaactactttggactgatctacaacaaggcccttctggagcaggccggtgtagaagcagttcccaagaccatggatgagttaaaggactgtatacagaaattaaatgacgcagagatcactccatttaccggtggttttgctgagtggtgggtattcaaacatgtattccagcactttgcaggtgcggcagtggaagattaccagagctttgtgaccgctatggaaaaaggcgaggattccctggcaaattacccactgatcaatgacaacttcttcgagttcgttgacctggtaaaggaaaacggagatgcgaagcctctggaagcagacttaagtgcagaggttgcagcatttgcctccggacaggctgccattatggtaggccagggcgcatgggaagaggctgacattatggagatcgacccagaactgcagattgaatttgccggctatccagtatctgacaatgcagaagactgcaaggtgatcactggttctgaccaggcccttcatgtttacaacgagtccaagaataaagaaaccgtgatgaatttcctgaactggtggtacacctctgattatggaaaagcatggttcacagatgttgcaggcgtagttcctccagtaaccacagatgtaaaatctgaaatggtaattccggcacagggtgatgaattagtggcagcagacggaagccttcctcttggcattatctactccacagacagcttccatcagtcctttggtgaggctatgcaggcatacgtgggcggagatgcttccaaggaagacaccatcgcagccatcgagacaaaatggcaggaattagacggagcttccagcgctgaataagactttgccgacacgttgggattcaaccagggggaagagggttcttccccccttttttgacagaaattagtttaaccgatgaacaaaataggaggcgtacatgaaatttacagagggttattgggaaaaaaatgaaagagcaaatgcagtacatgcatcacaggcatttgtcattgaaaaaatcccccacggaatgagggtggttgcgccggtgaaggtgatcacagacagaggcggtgccctggacgtgacgaccatcaccacggaatttacttctgtgcgcagagacatgatcagtgtgagaagctggcatttccaggggtatgacaaaaaggaaccgaaatttgagctttttgaggacatccaggatgtgcaggtggagatcggagagaaggaagctgtgatgaccgcaggccgcatggctgtccgtgtgaaccgagaagattttgaatatgtatttgaggctgacaataaggtgatcacccggtgcggcttccgcaacctgggttatatgcagtatgaccgcaaggttctcaccaagcttcctgcgaaaaattatatggctgcagaatataccccctatatggtcacagagctgcagcttcagccaggggaatgtatctatggccttggagagcgcttcactgcatttgtgaaaaacggacaggtggtggactgctggaatgaagacggcggcaccgcttctcagatttcctataaaaatattcctttttatatgagcagcaatcattatggggtctatgtggaccactgcgacaatgtatcctttgaggttgccagcgagaaggtggaaaatgtgggcttctccgttccgggagaggagatccgcttccatctcatctacggggataccatgaaggacgtacttgtaaactatacagatttaactggaaagcctgcccttcctcctgcatggagctttggtctgtggctgaccacctcctttaccaccaattatgacgagaagaccaccagctcctttatccagggaatggcagacagagacattcctctgagtgtctttcattttgactgcttctggatgaaagagttccattggtgtgactttgaatgggacgaccgcaccttcccggatgtgaagggaatgcttcagcgttataaggaaagaggcctgcacatctgtgtatggatcaatccctatattgcccagggcacaaagtttttccaggaaggaatggagaaggggtatctgctgaagcgggccgacggcagagggatcaaacagatcgacaactggcagcctggtatgggccttgtggactttaccaatcctgccgcggtgaaatggtatacagacaagctgaaaacacttctggatatgggcgtggattcctttaagacggactttggagaaagaatccctgtggatgtggagtactatgatggctctgatcccgtgtccatgcacaattactacaccaatctgtacaaccgggcggtatttgacctgctcatcagagaaagaggagaaggggaagcggttcttttcgccagaagtgccacggtgggcggccagcagttcccggtacattgggggggagactgcagcgccacctaccagtctatggcagaaagccttcggggaggcttgtccttctgcatgtccgggttctccttctggagccatgatatcggaggctttgagttaacggcaacggcggatgtgtataaacgctggctgcagttcggcctgctgtccacccacagcagacttcacggctccaaaagctaccgggtgccctggctgtttgatgaggaggctgtggatgtatgccgcaccttcactaagctgaaggcaagactgatgccgtatttgttccagatggcagtggaatctcataagaccgggattccctctatgcgctccatgatcctggaatttgaccaggaccctgctgcaaaatatctggatatgcagtacatgctgggcagcagccttctggtggccccagttttccgggaggacggggaagtggaatattacctgcccaagggaacctggacccatctgctcaccggggagaccagagtgggcggatgctggcagaaggatacctatgactacttctccctgcctctgtatgtgagagaaaataccattcttcccatgggagctgtggacaaccgcacagattatgagtttgccagggaggtacagcttcaggtatatgagctgaaggaaaaggcatcctgtgacattccggacttaaaaggaagctgtgccgtgcacgcagaggctgtgagagataaggagaggatctgcctgaaagtgtcagagctttcccagggacttacctggttattaagaaatgtccatgaagtgaaagctgtttccggcggtaaggcagaggataccaaggagggactggtgattgttcccgacggcctggaggtaaccatagagctggcttgatccgcttactcataggatttgcttgattcattcataaaaataaagcattggctgtcttttcgcagatttttgcggcaggacagcctttcctatgtaataaaagccctccggttaatatccaaaagtcgctgtgagataaaaaaaatctcttgggtccatttacggaagcaggaaaattgattatactgagtatgaggaaatgcggcaatacacagcttgtgtccgcagggagcagggcgggccttcgagggccgctttaaggaaacaaccggcccatggaaggtgatcctggggtcaagaaaggcaggaggagaagatgaaaccatacagaatactgaaaaaagaggaatgtcaggtcaccagtcctttttggaaccgttattttaagctggtgaaggagaaagtgatcccctatcagtgggaggtcttaaatgaccgccagccggatgcggagcccagccatgccattgacaatttccgcattgcagccaaagaaaagcagggagatttctacggcatggtatttcaggacagcgatctgtccaagtggctggaggctgtggggaatattctcatgctggagagggatgaaaagctggaggcagaggcagacagtgtgatcgatattatagagaaggcccagcaggaggacggatacctggacacctatttcatcatcagagaaccggacaagaaatggaccaacgtgctggaatgccatgagctgtactgtgcgggccatttcatagagggtgctgtggcttactatatggctacgggcaaggaaaaggtactgaacattgccattcgtctcgcagatcatattgactctgtgtttggaccagaggagggaaagcttcacggttatccgggacaccaggagattgagatcgcccttctgcgcctggcagatgtgtcaggtgagaaaaaatatgagcggctggcccaatattttctggataccagaggaaccaatacattctttcaggaagagctgaaaaagagaaactatatcagccactggacaggagaaaaggtggaagagcccaaccgctggtacaatcattttccaaatgattattataaccagttccaccttcctgtgagagagcagagaacggctgtggggcatgctgtccgggccgtttacatgtacacagccatggcggatctggcttccagaatagaagatgagaaattatgggaggcctgcaaagctctgtgggaggacattgtgaacaggcagatgtacattaccggaagcattgggtccacccacagcggggaagcctttaccgtggactatgacctgcccaatgacaccaactactcagagacctgcgcctccattggcctgatcttttttgcccagcggatgctgaaaaatgaggtggatcatatctacggggatgtgatggagcaggcactctacaatacagttctgggaggcatgaactacgagggaaaccgtttcttctatgtgaaccctctggaggttacgccagaggtgtgtgagggcaacacagagcgcaatcatgtgaagcctgtgcggcagaagtggtttgcctgcgcctgctgtccgcccaatattgcccgaaccttgggcggtctgtggcagtatttctataccgcagacgccaatacggcctatgtgcatctctacggagaaagccagggggatattgaaatggacaagggtattttccatataacccagactacagcctatccctgggagggacgcatccgtatcctgggaaaaatggatggagagggagacgcagtcctggctcttcgtatcccaggctggtgcacaaagcctgtgtataccatcaatggatgccttccagaggaggcagtgggcttttctgtccgtgaagaaaaggggtatttgtatgtgacaggagactggacggaggagacagagatttttctggatttttgcatggagccccgtctcatggaggcagacccaagagtccatgatgacggcggccgggcagctatcacaagaggccctctggtgtactgcctggaggaagcagacaatggaaaatatttaaatgagctgtatctggatgccggccagcccttgaaagaggtggtgggaagtacgccctgggacggttttgttcttattgaggctggcggataccggaaagaacctgcacagggcagcggcctttaccgggagtataattccgggaaaaaacctgtgaccctcaccgcagttccctatttcctgtggaataaccggggacagggggagatgcaggtgtggattcagacaagatcatagagaagagaccggaggggatgcttcggcgatggaggtgctaagatgaaactggtaaaaatgcagggcacggacctggtgctcagcaatgtgtgctatggtaccgggaattttggggagattttaaatgaggagcaggcctttgaggccctggatgcctttgtggaagcaggaggcacctttgtggatacggcaaatgtgtactgcagatgggtggagggctgtgccaattccagtgaatggtatctgggaaaatggctgaaatccagaaatgcatataataaagtagtcattgccaccaagggcggtcattatgactttggcagtccctctgtgtccagggtgaatgaaaaggagatccgcaaggatctggaggaaagtcttcataccatggggctggatcacatagacttttactggcttcatagggatgacccttccaagcccattgaggagatcgtggaccttatggagaagctggtgcaggaaggcaagatccgctattacggcgcttccaattattcccttgaccgtctgaaaaaagccagggcctatgcccagagcaaagaaataaaaggcttcagcgcagtctccaaccagtggagcatggctggggtgaatccaggggggaatttaaacagcgatcccaccctggtgatcatggataaggattatgtacagtggcatgaggacacacaaacgcctctggtccccttttcctccaccgcccacggtttttttgaaaaaatgtaccgggcaggagtgaaagtcgccaacggcaggctcctcacctctcctcaggagctgggactttcagaggacatgaaaaaggcgtatttcaatgaaaagaatttaagactgtatgaattcttatgtgagcagaaggaaaaatatcatgggccatcccttcatgtgctgtccattgcatggcttcttcaccagcccttccaggtattccctgtcatgtccgtatccaggacggagcagattcaggggctggcaatggccagtgaacagattattgacccgggaatgaaaaatatgtaaaacaaaaccagaattgggtgcacaaaatagtcaaaccattgatggaaattacagaaaatggacgattattttgccgcaccctcttttcttatacccaagaatctggtattctaacagtaacgtatttgcacaatctatggacagggagataaaagaaatggacttacaatggattgcccctccggttatcggagggatcatcggtctcattacaaacagtctggctattaaaatgctttttcgtcctttaaagccggtttttcttggaaagcaccagcttcccttcactcccggcctgattccaaaggagcagggcagaatcgccaaagccatcggcgtggtagtgggcagggacctgcttgatggggacacccttcgcggggctctgtgttcggagagtatgaaggaggttctgggacaaaagatccaaggtcttctggaatgggccaggactacagaagagtctctgggcggacttctggcccgccggaagctacggggaaaggcagatgatatggcccagaaggccggggaacaggtttcagcctatgtgacggaccggctgctggagcagaatctgggtaatgttttgattgattatgccatggaggagattgtggagaagcttaatcccatggtgaaaatgtttgccggaccggccatagagaattccagggaggatctggcggcccgcattgacggtctgatcaaagagaaaaccccccagatcgtcagcggttatgtccatgacacctatgaggattggatggataaacctctgtctttgttaggagaaaagctgtgggagagaaaggcggagattcaggaccgggtgtgggatatctatgagaagaccatgcgggaaaaggcgccggagctggtgaagaccttaaatgtggagaagatcgtggaggagaagatcagcgatttttctcctgcacaattggaacagcttattttggaaatttccagaaaggagctgcgggctgtgatctggctgggaggtgtgctggggatgcttatgggatttttgaatctgctgttttgacaaatgagaagaggtaagatatgcgccttggcgcagatgcacagaaatagaatggaattagaaaatggggaagggtattaaggaggaagaggaatgagtaagtggattaagaaaatttttcgaagtcaggtggcatcgtcgattttgtatttgatcttgggtatctgtctggtggctatgccaaagcagtccatgaaggtgatctgcatgatcttcggaggtgttttggcggcccttggtattgtgcacattgttctctatatccgcaacaaggagcagggctttttgctggatctgttttccggagctctgcagctggtgctgggcggcttccttctttttaatcctgccattatcataaagctgctgcctattttgctgggagccgtgatcctggtggacagcatctggaccttccaggcctgtctggagatgaagaaattgaatttcgtgcgctggaactggcttttgggagtgaccattgtgtttgtcatccttggcattgtgatgatcatcaatcccttcagtgcagcggaggtgatgatccggtttgccggggtggtgtaccttctcaatggagtcattgatattttcttcctgctgttcctgcggaacaaggataagatcatcagtaagatggctgaggccatgatcgtggatgtgaaccacgccgagaaggcaggagaaattctggacgcagaggttggagaggacggcaaggtagtggtggaggacgtggagatcgtaccagagccggaggacggtatttttgatacggacgatgcggatattattgatgtggatgtgacggatagtaagaaagaagaataacaaacagagcatatgattaaaaagccaactgggaataacaaaggtcccggttggcttttttgtatagaaaggatgtcgttttttaatggatattcttggctggaaatatggcagggatttagtgggaattgtttgatttttataataggaacagggagttgtgaaaattttataaaaaatgtactatgagttcataaaaaatgtcaatattcatgaaagaattactatgatataatattaaaatataggacaaactgtactacataaaattattgattatacttacatatgaaccggaaaaaggaataagactatacatttattttacaagtaggtgggttaataaaaaataaaagtataaaaagcaagaggaacttttcgtaacagaatgttatatgagcacacaaagttccgtagatggtttttgcgtgactggaaattacacaccataatttggggaattatttaagaaggcgggcatgctctgctgcccgctttatgggggagggcttatgaaattaaaaaaatgtttcatattgatatcgatgagtcttgtatgtatatctgtatcgggatgtttgacgcgaaatgatacaggtgaaaaaaaggtatcccagggaatagctcaggataagatcaagagcatagaactgcctgaaacttataataaagaatccggggaggtaacctacaacctgacactggaattacctgaacatctggatacaacgaaaatacgcaaaggggtgatcacaggttctgccaattccgacgaggaaaaagcaaaggaatactttggtctgggacaaaaagtaaaagaagaacgaaagataccaacggatcatgctgataaatttcagtacagttataaatttggaacggaaaatacttcctctcttggggcaggcgggccaactctgacatatacaagtgagaacgccagcttttattttagtgtatgggataaaacagaaaaagaagattgggaaaagaaagatatactagagttcgctgatgtggacacttgcattgaaaatgttaaggaaggcctggagtatgtaggatatccaacagaattggaatttcataattttacggttagagatgaaagattatctgaactggaggagcacattagtcatgatggagaacgggaagaggaaaattataaagagagctggctgccagaggattctgcttatgtcataatgggccggcaggtgtttgatggagtacccatacaccaacatatgatgacagcaggcagacagctggcatttgataattttgcattggaacctgttaagtgtgtttatacatcaagagggatcgagtatctttcggttgggattttatataatattcaggaaacggatgagtattttcaattgaaatcctttgaagatataatttcagtagtagataataaattaaatggaattataacagaagaaggctgccaggtgtaccgttcaaaatttattcaacttgtacaaatgaacgaaaaacaggagttcgatatggttcctgcatggtactttgagtatgaaattccaggggaaaccccatataaatcggtgatcttgatagatgcggttacaggggaagagctttctcattggtaaaaggagaactgaccgtaggaggtgaggggattgagagggtggttctgcgaagtgagaaggatttttaccagtcacaggatatatttatcaatgattggtgttgccgctgctctgtttttttcattggaaagcgatggactgcgtaacagcgtgctggaatcttatttaagggcagtaatattgtcaggctatttactgtgctattcatttgcggcatatgcttacggaactatattttgtgaggaactggagcatcggtatctatattatgaactgatgagggaaggcctcaaaaggtatgtggtaaagaaaaccttgatgatatacataagttctgtgtttgcaatcatagcgggaacaatggtctttggttttgtatgccggatatttctgccctgggaagcagaaaacggaggggcttattatattttagcggagggggtgtatggccagctgctggtggggaagcattatatatggtacctagtattcaatgctttacatatgggaatgtttgctggtcagctttctttagcagctgctttgttttcgctgtttattacaaacagaattatggtattaagctttcctgttttgctggtagagattttatatctattgccggggaagatcagatatacagatttttttagagggattgccggagtctttgacaaacaatggatgaatgttgcggtttctgtatcgatcagtgcggccgcagtgctgctgctgaccatattgatttataaggtgctgcagtccaggctgtaaaggaggcagaatgaaatttttgcgatatatgtggaaaaattcctggataaaaattgtacatatccgaatggctgcatttataatgtttcttacaattataacaattaattatcagatacccttaagaaaattttctcaggatatggattacccctgcgccatatgggtatttcccttcttaatgacgcggaatgtctatttgattcttttctattttggaaccatttatgtaaactcggatatcccttttatgcagcattccaatatgtaccaggtgattcgggtggggagaagacgatatgccctggctcagatgggcgctatttttattcgttcttttataatggtgatgcttacggttctttgttctattgtgacacttctgccaaatatagatttgacaactgactggggaaagcttatcagaaccggggcgtccacagattttgcggcgaaatattatttagaatatgcattttcttatgaggcattggtgaaattcacacctcttgagttaatggggatctccattgctgtaattaccttaattgtaacatttttaggtctcttaatgtatgcggtatgtctgtatgtaaatcgaatctgtgcagtggcagcggcatctgggatgtctatattgctgtttttcgtcgagaatcttcatgtagcgaggcagctggaggcggcccgctgggttcctactttatgggcagaagtggctggggtggaatctcctaaactgggcttttattggcttccgcccatatcctatatgttttgctgcctgttcttgctcattggagttttgacaatactgattgtgtataaggcaaggtatgcagagtttgactgggctaaggaagatatgtaaacggaggggacaatggcagagattattttagaaaatgtaggaaaaaactttcggggtgtacctgtattgaaaaatatcagtgttcgttgtgaaccgggaaaaatttatggctttgtgggctataatggttcaggtaaaacggtgctgtttaagtgtatctgcgggcttttaaaatatgattccggacagattaaagtagatgggaagatcatgggcaaggagaaggatatgctcacaaatgccgggattattattgaagagccgggatttataagaaatcggtctgcttttcagaatctggattttctatattgcctgcgtaatcccaggaataagcagcatatttatcagatgctggaacgagtgggacttgatccaaaggaaaaaaagcaggtgggaaggtattctctggggatgaagcagaggctggctattgcccaggcgatcatggaggatccacagatactgattttagatgagcccatgaacggactggacaaaacaggggtaaaggagatgtatgaaatttttttagatatgagggcacagggaaaaaccattctccttgccagccataatccaaatgatattcaaacattatgtgatgaagtttatgaatttgaaaatggttttttaaccttattaaggaggtcccagggtgttggcaagacggaaacataagcggggccgttcctgcgatcaggctgcacagattcagagtgtaaagaaaaactccccagatgatctggggagcctccagaagctatacctttcggtcctacggcttcttttaaacatctatttagtacctactgtaccctgattcctcaggtatggtaccaaggcggccttagtacccactgtctttaatccttaagataatacagggtaaactcatttttatgaaaggacagcaatccttcccggctcaggcggccaagctcggcggagagggcacttctgtctgcacatagataatcagccagttcctggcggttaaaggggatggtaaaggagctgcttttggcaagctgggactgctcggacaaataggccataagcttctggcggagcgtgcggctggaaaggcagtggatcttctgggtgagctggtatgccttctgggcaaggactgccatgaggttctggatcagtacggtgtgaaaggggcaggcagaggtgcaggtggtggacagacgggacacgtccaggaaaagcacctgggattcctgggcggcgatcacattgatggtggctggctcctggttcaggcaggcatagacctccccaaagacctgagaaggataaaccctggccaggattgagcggtttccccaatagtcttctttttccagagaaatgctcccggtgagcacaagccccatttctttcacaggttctcccagagaatacagcgtggctcccttttcatattgtacctgccgggcatccaggcaggagagcatggcacagatgtgccggggttctattcccttaaaaagaggagaatttattaaaacaggcaaaaattctttcatttctctccattccgttgtaaatacaacatacaatttttctcattatagtacactgggtccataaacacaagagcggacaaaaagagaaagtaaaaaggaaacagggtggtaatgtggcaggagaaatctgccagatatccaatgggaaagacagcggtgtaggtgattggtctcccacagatacggcttccagggatcttatgggggatggaatcattccaatcaactactgtttaaattcctgttgtaatttctgataaagcagaccagcaacaggggaaaatatctgatattttttccaaatgatatacatgggagactccattgacggatgaagtggcatgaaacacaatttactttcgctcccggtatagatcagccgttcaaatcccagagcaatccccatgttttcctttaccatgacagaagcattataaatcaaatcataggtagcgactatatttactttgcttagcatatcgccaaaaaataatgtggtttctttttttagtccttgcctggaggatatgatgggatatggaagtaaatccatgggttctatgtatgcttttttggctaaaggatgatcttttctcagtagtgcaccccaacaatcggttacaggcattttgatgaaattgtatttttctaaatctacttcttccacaataattgcaaagtcaagaagtcccttatctaagcgttctgaaatagaatccgtagcgctgctgaagatatggtatcttatgcctggaaattcttcttgaagttttcttagtatacgaaaaaagtatttcatgccttcagattctgcacaaccgatatagatatctccaccatttatttcatctaaagctttaaactcatctgtagttttgtctaccatgtcaataatatcctctgctcttttccgcaaaaggataccttcatcagtcagatgtacattgtaatttgttctggtaaaaagcttttttccgagttcagcttctaaatcctttaattgtcgtgacagcgttggttgagaaatatgcaggtgcttcgctgctcttgtaatattttcttctctggccacttcaagaaagtatcttaatactctgatttccatattgtaatcccccattgtctgtactttttgaaaatagtatagcacatagagaaatacgttacaagaataactagatatgattattaaatattttacatttctgaacaacaattatagaataaatatagaaaggaacaggaagatgagattcaaagactggagaagcttggtgatgaaacaggaatcagtacacttcgggaatgggaaaaggaaatggcataatggaatcaaagagagaaattacagtatctgatgtaatagatggattttgtgaaaatgcagaggacaaggaagaacgtgttttgtttgcgaataagttgtttcaagaagcaataagactggggatggagctaaacacaaaatatcatacaccggaagaaatacgggaaatcatggcacagattacagggaaaaagatagatgataaatttagattattcccgccattttatacagattttggaaaaaatactgaaattgggcaggatgtatttattaactctggctgccattttcaagatcaaggaggaattacaattggagatggatgcctgatcggacataatgtagttctggcaacgatcaatcatgatttacaacctgagaacaaaagaaaaaatcattatgcaccaattcatatcggaaaccatgtatggattggttccaatgcgacaatcctgccgggagtaacaatcggtgattgggcggtggttgcggctggatcagttgtcacgaaagatgtaccagaaaaggtggtagttggtggaaatccagcgaaaatctttaagaaaattatatagaatagtaggaacagatatgaacgattttatttttcataatcctgacaaggtattttttcggagaaaccagttggaacatttgccagaagaaatcttaaacatagggaaaaaagtattgttggtatatggaggcggttccattaccggaccgagaacactgttgccggaagatgtggagaaaatatatagtatgtgtctgtaagagtgaacttgaaatccagtgcggctaaaagaaaacatgagagagttttaaagaaaaggtagggtgaaatttttgaaggtaataggaattagtgcaagtgcaagaaaagatgctaatacagcaatccttgtaaaaaaggtgtttgaagggttggaaactgcaggaatcgaaacggagctgatacagttctcaggagaaattatagaaccatgtaaagcctgttttgcgtgtggggggaataataactgcattcataagaaagatatgttccatgatgtatttgaaaagattacaaatgcggatggcattgttttaggctctccggtttattcagcaaatatttcagctaatatgcaggcatttttggaaagagctgctgttgtagctgatatgaatcctggactgctaaagcacaaggcaggcgcagcggtagcggctgtacgcagaggtggagctttagaggcagtagacgctatgaatcatttctttttgggccatgaaatgtttgtggccggttctacatactggaatatgggatatggacagatgccgggggatgtattaaaagatgaggaaggtttagccaacatgaaaaatctcggggaaaatatggcacatcttttaaaagcattacattaaaaggaggcgtattatgaaaaaaacaggaatcatcttattgatattctgcctattattctgttgttcggcctacggcacagacagtaagccacaggatactttaacagaagaaaaaggtacctcatcaggaacatctacacaagagacagacgaagaagaaaagaaagctgagaaagatacaatggatacaaatacattagttacatacttttcatgtacaggaactacccagaagatagcagagtatgcagcagacaatcttcattctgtcagtccagatgcagtgtggctggagggagtgagattttcgggagaaacttccaaatcagatgtggagacatggctaaatgaacacgagttgactgcaaaatcagataacagtacgggcagtagagaatttaattttgaaacccgcacagttacactgaatagcggatatgaaatgccaattaatgggcttggcacatacagtctgcatggggatgagtgtataaattctgtaaaggctgcattacaaagtggcgttcgtctgatagacacggcttccgcttatgaaaatgagcaggaggttggccaggccatccgggaaagcatggaggaacttggaataaagcgtgaagaaatattcgtcacaacaaaaatttatccgggtgatgagatggaaaatccagagcagtccattcaggattgtattgaccggctggatattgggtacgtggatatgatgctccttcatcatccggatcccaatgatgtgcaggcatataaagcgatggagcagtttgtaaaggatgggaaaataaggtcgataggactttctaattggtatgtggaggaattggaagaatttctgccacaaatcagtattatgcctgcattggtacaaaatgaaatacatccctattatcaggaaaacgatgtgattccctatatccacaatctcggtattgtggtacagggatggtatcctttgggtggccgagggcatacagctgaattgttaggggatgaagtgatttctgccattgcggacgctcatggagtatcttcagcgcaggtaatcttaagatggaatctgcagaagggtgtagtagtgattcctggttccagcaacccggatcacattctggaaaataccgaattatacaaatttgaactttcacaggaagaaatggaacagatgaatgccctggaccgaggagagaagcatgactggtattaacctgatggaaaagaagagtagaaaaggtcaatctattttgtgtggattggctttttggttattttgaaatatgcagttgggggaatatgatgagaacagctattgtagatgatacacaggatgatgttcagtgtctggctgagtttttacagaaatttcagaaagaacaggcctatgatattcaagtggatttgtatcattccagtattgatttcctggaggaatatagaggtcagtatgatgttatcttcctggatatagagatgccgggtagtaatgggatagagactgcccatgaaataaggtcaaaggatgagagcgttggaattatatttgtgaccaatatggctcagtatgccatcaaaggatatgaagtgaatgccattgatttcattgtgaagcctgttggctattatgtttttgcggaaaagctggaaaaggcacgccgcttttttgaaaaaagagagcgtaaggacttattgcttagtaaagaagacggcattcatcgtatttccgtttcagatattttatacatagaaaaagataagagcgatctggtctttcatacggtaaaaggggattttaaggaaagagggaccattaaattattaaaagaaaagctgaaaggtgcatcattttcagaatccaccagcggatgcctggttaatctgtcaaaagttacaggggtcagtaaagaacatatttctataggggaaaggcagctgccgctatccagacgattaaaaaaacagtttacacaggaatatgtgggttatataggaggtggtttttgatggatttcaattctataatgaatataaattttattcatttcccggtagaactcttgatttgtgaaattgcattcctgattcataaaccccggagagaatattttgtgcctaaaataattggttccctgatcctgtattttatcctttccggattctggatgtttctcattgacaaagtaagcggagaatatctgtttccatatgtgctgctgtatattggatatgcggtgttaacagccataccaattatggtttgttttgaactgcagactttagaattgttatttgtaattgccggggcatatgcaacacagcatatgtgttatgctttattaaggatttttttatatacagtcaggcattcattagatgtggaaggggtactcaggctttttacgcagtatgtattctatggagtgtgggcggttctgatttacttcattttgatacgaaataatcaggagaaagacggatttcgcacagaggacatccgcattgctttttttgcagtgctgcttgcagtttcagcaatcggatttagtgtttattacacatatccggcagatactacccctttgaataaatatacctgtgtactgtgtccggcctatgggtttttatgctgtgcactggtgttggctatggaatattatgtgctgcgtgaaaacaggatgaagagagaacgtgaactcatggaacagcttctccagatggctaatacacagcaaaaatgttcgaaagaggcaattgatatcatcaatataaaatttcatgacctgaagcaccagatgaaagtgcttgaaaagatttctgatagtaaaaaccgttctgagtatgtaaaagaaatacagcagacagtttctatttatgatgcaatttttcatacggggtgtgaacctcttgattatgtgctccgtgaaaaatgcctgatcagcaatgagtatcatgtggcatttagctgtatggcagatggtgcactgattaattttatgaaccccacagacatctatgcgctcatggggaacgcatttgataatgcattggaatgtgtattgaaagaagaagaacaaaaacgcacgatcagcctccatattaagcaaagcggggatatggtactcatacatatggaaaaccgatgcagcgtcagtccggaatttcaaaatggccttccggttacaaataagaaagataaagattatcacggctttggggtgagaagcatccgatatattgcagaaaaatataatggtgaattatatacgaaagtaaaagacaaaatgtttatcctggatgttcttctgcctgtaagaaaataaccggatatatcaaaaaaacgaccacttttctcaaagtggtttttttctttttaaacacattataattggcttaacaaccaacaacagagtgtgaaaaaggaggaaaaaaatgattgagtttcttgtagatttagtttccccattctttttaagtttgggagtgagccagtcagacatcaataattatgcggatcagttaagtggttacgtatatgcgattctgggattgctggcagcggcagtgctggtaatgatcgcagcacactgggtggcaaagaagggaacacgccatgtcatccgctttggagcggcactaagctgggtgctgattgtggggattcttgtaaatataataagttttggtcccatgtacaataaccttgcgccgattatcaatggcaggggaagtgtttcggaggaaaccgcagagcagtccaaagaagtgatccaaaaagtcggggaggagggaatggtacttttgaaaaatgatggggtgcttcctatttcttccgataaaactaatatcaatgtttttggctgggcatccatatccggtattttcggaggaaccggttcaggcgccagtgacagcgaaggaagtatcggcgtgatagattctttggagcaggccggatttgaaaccaataaggcgctgactgacatgtatagagaataccgctcagaaagaccaacagaagtaaagtccaaaaagaatgatgactggaatatgagagactggacattaccagagcctgcagccgattactacacggatgagataatagatgaagcagtcgggttttctgataccgcagtcgttgtcattgcaagatccggtggggaaggccgggatgaaccaacagatatgaatgccgcaattaacggcacctatgacccgcgcggggagattggcacagctgagtataattattatgatgctgcctacaccaacaatggagactatgatgattatgattccggtgagcattatctggaactgtccaaaacagaagaagcaatggttgacttagtctgttcgaaatttaaagatgtgattgttgttatcaatgccaataatgctatggaacttggatgggtggaggaacatgaacagattggtgcggtaatccttgcaccgggaacaggcgcaacaggcatgacagcattaggagagattctgaaaggcacagtcaatccgtccggaaaaacggtggatacttatgtatatgatttgacagatacaccttcttacaataactttggcagctttgtctataacaacgtggatgaactggtagaagccagtctggaggcagacccggcatatcagggggtacagggatttgttaattatacggaagggatttatgtggggtataagttctacgagacagccgctgaagaagggctgatcgattatgaagaaaaagtacaatacccctttggatatggccttagctataccacgtttgaacagagtattgaaaattttgcagacaatggagataacattactttggatgtagaggtgacgaataccggagatacggcgggaaaatcagccattcaactgtattttacaccgccctataccaatggcggaattgagaaatcttccgtaaacttaattgactttgggaagacagataatctggaaccaggtgcttcagaaacggtttcctttacgattaacaaagaggacatggcatcctatgattctaatcaaataaaagtctcaggcggcggttatatcctggagcagggggaatattccatctcattaagagcagactcccatagggtgctggatcaggaaacctttacggtcagcgaggatattgtttacagcgcagatggtcgtgcgagtgatggtattgcggcagtgaaccaatttcaagactactcagcagggaatgtgacctatctttcccgtgcggatcagtttgctaattatgcgcaggcgactgctgctccagacaacagtgcatatgaaatggatgagaacacacttgcgaaggtcagtgaaaaatccgtggcatattatgacccgtcaaaatatgatgatccagatgatgagatgccggttacagatgcagacaatggagtgaagcttgctgatctgacgggaaaagattatgacgaccctatgtgggaagagctgctggatcagctgagtgttgatgagatgatcgatatggtgaacctggcaggtttccagacgattgcggtagattctgtaggaaaaatggcaactctcgacagtgatggaacagcgggactaaacgactggtatattcaggtatatggaacagcctttcccgttgaagtgctgattgcacagacatggaacaaagaacttgcatatgagactggggccgcgatcgcacaggaatatgcggattgcggaatctacggatggtatggccctgcaatgaatatccatcgcagtgcatttggcgggcgcaactttgagtattattcagaggacagtgttctgtcaggctatatcggatccaatgaagtgaatgcggcggctgaaaaaggtgtttatgcatatatcaaacattttgcattaaatgaacaggaaggtaacagatgctgcatgctgctgacctattccaatgagcaggcaatccgggaaatttatctaaaaccctttgagatcagcgtgaaaaattttgattttgcaagcagcaaaccacttgcagttatgtcttccttcgtatttatcggagacagatggtgcggtgcgaatccaaatctcctgaacagtgtgctgcgtgacgaatggggatttcaggggatggtcctgacagattggaatggctcctatggttaccagaatacacaggattgtgtcagaaatggaaatgatgcaatgcttggctttaaccagcatgaatccaataagattaccaacaaagattctgccacattggttaaggcacttcgtcaggcatctaaaaatatgatgtataccataggaaacagcggaaattatacggctgctgacgcaaataccggaggtatggagcgaatgactaaaatttatatagcagcagatctattgcttgtccttttttgcgcaggcgttatgacaatcgtgcttcttcgctggaggaaaaatagaaaagaagaaccagtcattcaggtgcagaaagcagagtaagataaaagggaattgggggtaccccagttccctttctctatttcccatctgtttcccaactacggcaacggttgttaatagttggaataagatattttttcatttttctccattctgttgtaaatacaacatacaatttttcctcgttatcgtacactgggtacagaaacacaagagcggaaaaaaggaggaaggtaaaatggtacgaaggatcattacaataaataaagaaaaatgcaatggatgcggtttatgcgcccaggcctgccatgaaggagccattgccatgatagacggaaaggctgtacttaccagagatgattactgtgatggactgggggactgtcttccagcatgtcctaccggagctatcacctttgtagaaagggaggcggctgcctatgaccagaaggcagcggccgctctgggccagtggccggtgcagatccgtctggtacctgtgaaggcaccttatttccagggggcgcatctgctcatagccgccgactgtacggcctatgcctatggtgacttccacagggattttatgaaaggaaaggttaccctgatcggctgtccaaagctggatgagacggattatcaggagaagcttacagccatcctggcagaaaatgagattcaaaaagtaacggtagtgcgtatggaagtaccctgctgcggggggatggccagggcagtggagggggccgttgcagggtgcggcaaggacattccctgtgagaccgtggtgctgtcgctccagggagaaatggtagaagtacgacagatataagaaaaacggatgtaagtaagaggagaacgcctcaacggacaattgaggacggaacacccacatgtgtatatcaggaggataaaaatgagagaaatgttttgttttcagtgtgaacagacagcagactgcacaggctgtacaggaaaagcaggagtatgcggcaaaactgcagaggtaagtgccctgcaggatgctcttaccggagcgctcatcggacttgcaagagcagtcgatggaaatgaacctgcagaaagcaccgggcggattatgatggaggggctgtttgccacccttaccaatgttaattttgaccaggaatatttaaaccagatgctggaacaggtgaaccgggaaaaggagaagctggtgcctcagtgcagggagtgtgcttctccctgtgccagaaacaaggactatgatatgaatcacctgtggaacgcaccggaggatatccgttccctaaaatcattgattttatttgggcttcgggggatggccgcctatgcctatcatggggctgtgctgggataccgggacaaggaggtggaggaattcttctacgaaggcatgtttgcagttggaaaagacctggatctggaccagcttctgccccttgtgctcagagtgggagaggtgaatttaaaatgtatggctcttttggacaaagccaatacgcaaacctttggtgatccgcagccggttcaggtttccagaaatttggaagctggaccctttatcgtggtcagcggccatgacctgagggatttggagcaggttctcatccagacccagggaaaggggattcaggtatatacccatggggaaatgcttccggcccatgcctatccacaattgaagcgtttccctcatttaaagggaaactttggcacagcctggcagaatcagcagaaggagtttgcacatcttcctggagctgtgctttttaccaccaattgcttgatgcctccaaaggagagctataaagaccgggtatttaccacaggtgtggtgtcctgtccgggagctgtgcatattggagaggacaaggattttacccctgtgatcaacagggctctggagctgggcggttatacagactctgcagctatgaaagagcgggatcagggaagctgcctcattgggttcggccatcatgccattttggcaaatgcccagcagatagcggaggcagtgaaggcaggagatatccgccatttcttcttggtgggaggctgtgacggagccagaagcgggcggaattattaccgggaatttgtgaaaaaaacacctgaggataccataatcctcaccctgggctgcggaaaataccggttcaatgatctggatctgggaagcatcggcgcttttcccaggcttatggatatgggccagtgcaacgatgcctatggagccatacaggtggcggcggccctgtcggaggtatttcagtgcggcatcaatgatcttcccctcactttggtactctcctggtatgagcagaaggctgtgtgtattttgctcagtctcctccatctgggagtgaaaaatatctatctggggcccacccttccggcctttgtatcaaagaatgtattggggtatctggtggagcactacgggatcactcctgtgggcagcccggaagaagatttgaaaaaaatattgacaaagtagaaaaatggtcatataatacaagaaactttatagagctaaactgatgaagcggaagtaaaaacagttcgtgcgcttacagagagtcccgttgctgagaagggacagaaatgcagagtgttataatgggccgctgagggcacagtcaaaggcagaaatgctgagtattctgtgacgtgagggcatacgtaagttgccggggatatgttggtatcctgctaagagcgtagtgttttactgcgaaccaaggtggcaccgcgggaatctgtttttgtaaatagagcccgtccttgacgatagattgttttattgtcaggggcgggcttttttgttgtctttcatcgtccgtcccggaaagaaaaggaggatgattctatgtaccccacacttgaagaaatttacacaattgtacagacaggagattatgacagaattccggtgtgcgcagagatttacagtgattttaccactcccattgagaccatgagagttttgcagaaggtaagccatcactgcttcctgctggaaagcgtggaggacagcaggcaatggggcaggtatacctttctgggatatgatcccaccatggagattacctgcagccatggccgcctgaaaatccgcgggcaggagacaaaagagacgttcacaaggagtccccaggaggccatccggaagatcctcaatacacacaaaagtcccaagcttcctggaatgcccacctttaccggagggctggtggggtacttttcttatgactatatccgttatggggaagaaaaactggactttccacaggaagaggaagaattccaggatgtggacctgatgctttttgaccaggtgatcgcttttgatcatctgagacagaagatttatctgatagcaggggtggatacgaaaaatctcaaggactcctacacacaggcccaggaaaaaatccgaagcctggaggagcttttaaaaacagggaagaaaaaagaaaatgagcccttccggcttttgactgaactaaagcctatgttttcccgggaagcctactattgcatggtggaaaaagccagacagtacatttacgagggggatattttccaggtggttctttcaaatcctctgaaagcaaaggcccagggcagtcttctggacatttaccgggtcctgcgcaccaccaatccctccccctatatgttttacttttccagcgatgatattgagattgcaggggcatccccggagaccctggtaaaattaaaggacggcatccttcacacctttcctctggcgggaaccagaaagcggggagagacaccaaaggaggaccagcggttagaggaagagctgctggctgatgaaaaggagctggctgagcacaacatgctggtggatctgggacgcaatgacattggcagagtcagctgtctggggactgtgcgggtggaaaaatataaatccatcgaacggttttcccatgtgatgcatattggttccacggtggctggggaaatccgggaggataaggatgccctggatgccatggaggccattctacccgcaggaaccctgtccggggccccgaagatccgggcctgccagatcatccatgagctggagggcggccagagaggagtgtacggaggagccatcggctatctggacttttccggaaatatggatacctgtattgctatccggctgatttataagaaaaacggccaaatctgtatccgctccggagcagggattgtggcagacagtgttcccaagaatgaattcgaggaatgcatgaacaaagcaaaggctgtggtgatggccatggaagaggcaagggagggattgaaatgattttattgattgataattatgacagcttttcctataacctgtatcagctcttgggggagatcaccccggatattcaggtcatccgaaatgaccaatgcacggtacaggatgtggaacatcttagtccccagcttctggttttgtcaccaggaccgggaaaacccagggatgcagggatctgtgtggaggcggtccaatactttgcaggaaagcttcccatatttggggtgtgtctgggccaccaggccatctgtgaggcctttgggggaagcgtatcccacgcaaagacccttatgcatggaaaacagtccaggatccaactggacaatgacagcaccctgtttcggggcatgccctccaccattttggcggccagataccattccctgtctgcagtaagggaggaattacccgctgtattaaaaattacggcagagagccaggaaggggagatcatggccgtagagcaccggacctatcccatctacggagtccaattccatcctgagtctgtgatgactccccagggactttccattataaaaaatatcatgccagaaactaggtaaaaggtttaaggaggtaagaacacatgattcgagaagccattttaaaattagcaaaaaaagaggatttatcttataaagaagcagaggaagtgatgaatgagattatggagggcgttgccactccggtacagatgtctgcctatttaaccgctctgtctttaaagggggagaacatcgatgagatcaccgcttcggcggcgggaatgcgtgcccactgtattaaacttctccacgatatggatgttctggagatcgtgggaacaggaggggacggagctaattcctttaatatttccaccacctccgctctggtgatctccgccgcccaggttccggtggcaaagcatggcaaccgggcagcttcctccaagtgcggggcagcggatgtgctggaggcccttggggtgaatatcaatgtttctcctgaggtgagtgcacggctgctgaaggagatccatatctgtttcctgtttgcccagaattatcacattgccatgaagtatgtggcccccatccgaaaagagctggggattcgtactgtatttaatattttagggcctctctccaatccggcaggagccaacatggagcttatgggggtgtatgatgaggccctggtagagcccctggcaagggttatgagcaacctgggcgtgacgaaaggtatggtagtctacggagaggaccggctggatgaaatctccatgagcgctcccacaaaggtgtgcgagatccgggacaaagagctgagatcctacaccatcactccggaacaattcggctatgaaagatgcggcaaggaagagctggagggaggtactccacaggagaatgcggccattaccaggagcattctcaagggggaggaaagagacgcgaaaagaggggcagtgtgcatgaatgccggggctgccctgtatctggtgggcaagacaaaaaccctggaagagggcgtgcgcatggcagaggagctcattgattccggggctgccctggcacagctggagcgttttattaaggagagcagccgatgaatattttagaggaaattgcagccaaaacaaggcagcgggtggagagagaaaagcaggtgatttccatggagcgtatgagggaaatggcagagaaaaagactggagctgctgattttccctttgaaaaggccctgtctcttcccggacttcagtttatctgcgaggtgaaaaaagcctccccatccaaggggatcattgctgaggattttccctatatgcagattgcaaaggagtatgaggcagcaggggcggcggctatttcctgtctcacggaaccagagtatttcttaggaaaaaatcagtatctggaagagattgctgcccaggtgtgtatcccagtgctcaggaaggattttacggtggatccctacatgatctaccaggctaaggttctgggggcaggggcggtattactcatctgtgcgcttctcaatgaccgggagctgaaggaatatctggaccgaacccattgtctgggaatgtctgctttagtggaggctcacacagaagaagaggtggcaagagcctgtgaggcaggggccaggatcattggggtgaacaaccggaatctgaagaattttcaggtggatgtatccatcagcgtagctcttagaaaggcggcacctaaggggattttgtttgtgtcagagagcggcatccgcacccgacaggacgtaaaaatcctggaggaaaatggaacagatgcagtgctgatcggtgaaacacttatgaaaagcccggataagaaaagacagttggatatattccgggggaaggcgctatgagtaagacaaaaataaaaatctgcggccttcaacggccagaagatattcaatatgccaatggctgcagaccggattttgtaggattcgtatttgccagaagccgccgccaggtgaccttggagcaggccggatgcttgaaaaaacttctccacagggatattctttccgtaggagtttttgtggacgcacccttgtctttgatccaggaggctgtggataagaagattattgaaatggttcagcttcatgggaaggagacgccagagtatatggggcagctaagaacgcttgtggcagtacctgtgatcaaagccatctctgtaaaaagtgcggctcatgtggttcaggcacaggaacttccctgtgaatatcttctgttggacaatggccagggaggaacaggagaggctttttcctgggagaagcttgaagaagcaaaaaggcagggctttgaaaagaagtttttcctggcaggaggactaaacgagaaaaatattacccaggcattgcagtatggggcgttttgtgtagatgtgtccagcggtgcggagacggatggatataaagattttcaaaaaatgaaaatgctgacagaggcagtgagaaaggattgataaaacatgtcaaagggacgatttggagtacacggaggccaatatatgccggaaactcttatgaatgcggttttggagctggaggaggcctataaccattataaggatgacccggaatttcagggagagctcacagagcttctcaataattatgccggaagaccatccagattgtattacgcaaaaaggatgacaaaggacctgggcggggccaagatttatttaaaaagagaggatttaaaccatacaggctcccacaagatcaacaatgttctgggacaggtgctgctggccaagaagatgggaaaaacacgggtcattgcagagactggggcaggccagcatggagtagccactgccacggcggccgcccttatggatatggaatgtgaggtattcatgggtgaggaggacaccaggcgtcaggctttaaacgtatatcgtatgagactgctgggagctaaggtccacccggtgagctcagggaccggtaccttaaaggacgcagtttctgagaccatgcgggagtggaccagccgggtggaggacacccattatgtgctgggctctgtgatggggccacatccgtttcctaccattgtaagagatttccaggcagtgatctcaagagagatcaaagaacagcttcaagagctggaaggacgtctgccggatgcggtgctggcctgtgtggggggcggttccaatgccatgggagcattttatcattttattgaggagccctcggtgcggcttatcggctgtgaggctgcgggaagaggtgtagatacgaaagagacagcagctaccattgccactgggaagctggggatttttcatgggatgaagtcctatttctgtcaggatgaatttgggcagatcgcgccggtgtattccatatccgcaggtctggattacccggggatcggaccggagcatgcccatctgtatgacattggaagggcctcctatgtgccagtgacagacgaggaagcggttcaggcttttgaatatctgtcgaaaatagagggggtcattcctgctattgagagcgcccatgcagtggcccatgccataaagatggcgccggaaatgggaaaggatcaaatcctggtgatcaatatttcaggaagaggagacaaggactgtgcagccatcgcacgctacagaggggaggatatttatgagtaaaatacagcaggcatttcaacagggaaaggcgtttattccttttatcacctgcgcagacccaagcttggatgtgacggagaagctggtctacgccatggaagaagcgggggcagatttaattgagctggggattccattttctgatcccacagcagaggggcctgtgatccaggcagccagcaagagggctttagacgggggagttaccacggataaaatctttaaaatggtggagcggatccgcaggaaaacgcagatccccatggtgtttatgacctatgccaacgtggtgttttcatacgggcaggagcggttcctgcgtactgcctctgatttaggaatggatggtctgatccttcctgatgtaccctttgaggaaaaggaggaattcgcccgcacctgtagaaaatatgccatggatatgatttctctcatagcccccacatcccaggaacggatcagcaggatcgcaagggaagcccagggctttgtgtactgtgtatcttctctgggtgtgacgggagtgcgctcagagataaccacagatatcgccagtatggttaagctggtgaaaaaggaaaaggacattccctgcgccgtgggctttggaatctccactccccagcaggcggccaagatgagtaaacaggcggacggtgtgatcgtggggtctgccattgtgaagctgtgtgcccaatatggggaagggtgtgtgccttatgttgcccagtatgtgaagagtatgaaagatgccatgaaagaggcgtaagaaaatgagactggtttgtgtgagttttgatatggggatggccctgtgtttctttttcctgggcttgtacttttataaatccgatggcagaggcagcaaatggattgcgggttttaatatgaaagcggaagagcagaagcgggaatatgaccaggcggggttgtgcaggtattatgggaggaatattatgctttggtccatacccttccttttaggctgtgtcattgacagctttaaagcaggctgggggactggcctggcctggacggtgtttgtgattctgttgattctgcatatggtgaagacaggaaaagattttgagagatggaagttataagaaaactcctcctggtccgggatgaagattccggggcaggaggagctttttatataacagaaaatcctttgtgaactccctgttatataaaaccctccgcggggatgcacagctttgtttttatttaaatatgattgaatatgataaaaaatgcaaataaatgaaaaaatagaataagaaacaaattgttgctggtgaaaaattgaataaagtgattggtgaaaatatataaggccctgctgcgtgcattcctgaattaattttcagtctgttctgaatgtggggctttttctgtgtcgatcataattatatttccaggcaggttttcctgattttcgattctgttgctgataatggagtcaaagctggacagtctggtccagcggaagaagccctgcatggcgatcttgtcagcgttaatgagcagataggcatgctctgcaacatccaacgcctcctgtttaatggcaggggtatctaattcagcggaataacaataaccgtcttgaaaattcactgaactgcagccgaaaaaagcccgggaaaaatggaactgccgcaggtacatctgggcgtccggacctatggacataccataaggagccagatagtagcctcccacgacgatatattttgcctgtggatttttaattttctgcaaagccttaatattgggggttactaccaccacctctctggcggccagcgcttcaatgagaggaatacagctggtgcctccgtccacatacacgcactccccatcctgaataagagaagcagcatacctggccacagaatttttcacctgcatattgattccctgtttgctggatatggttaattccgctcctacggacggctcagtcggagccgaatccacgttggtggcccctcccttgatcttcaccagtactcctttgtgttccagtttatcaaaatctcttcgtatggtggcttctgacacagacaattccttggacatttcctttatggtcacgatcccccggctgtttaattgattttttatatagagcattctttgcgctgcaagcatcaacaatcctcctagtgatgtatttattctttttctaagaaatgaagctctctttgatctcgtgataaatataacataaaacaataggaaaatcaattgcataaatgcatgaaaatgaaaagttttgaaataaattgaaaaaataattgacaataaatgaaaaaaatgctaggatgagcttatgaaaagtgtgaaaagtgcaaaaaatccgtataaagacggtaaagtaagaacaacatctgaaaaatatggaacaaaccggcgccgtttgcaaaatataatgattggagggttcaagaaatgaaaggaaagttaaggaagtcactgggaattcttctgacagcaggaatgctggcgggagcggcaacagtttctggagcagatgctcctggggaagctgagaagtataaaatcggactgcttatctctgatccttcggaaggattttggaaggaggttttggagagtatccagggagcctgcaaggagaaggagtttgaactgacgtatcagattgtggatgactcctcacagatgcgcacagcctttgattctctggtgtctcaggaggttgacattatcctggacggctattctgtggaggaggttgcggctgcctattgccaggaggcagtggatatcggtatgcccatgctgaccattgcctttgacagcggagttgaaggagtatatggatttggaacctctaattcagggatggccgtaatgtttggagaggcagcagtggaggaaattgagaaaagatgggatggacaggtggatttgatcattttggcaaatgcctataccatggtcccggccatggcatccagaacggatgaggcactgccggtgatttatgaggcgtatccggatctggaggatgtggaagttgtaaagctggatatggaaaatgacgtgacctctatttttaaaaagaccatggacaccataacctctcacccggatgcagaaaaggtgctttatatagcacccacggacaactttgtgtcctatgccctcagtgccattgaacagtgcgggatggaagataactttatcatcttcagctctgatgacacacagacggcacaggcttatttcagggagacgaaggagctgggaacggaccggccatgggtaggctctctggatcttcagacctccacttatggatatctggtcatcgataaggcggtaagaatcctggaaggaactgaggaggaatattataccgagcattatcccactatggtcacggctgaaaacattgacgaagttcaccctggaaaatagcggaaggaacagacagggaggccgcaagggagggatgtaattgggcgggaaattattggaaatgaaggggatcgtaaaaagcttccccggagtggttgcactggaccatgtggatctggagatcagcggcggagaggtgttggccattgtaggagaaaatggagcaggaaaatccactcttattaagatcatgtccggagcgtaccagcagaaccagggacagatctacatagacggcaaggatgtgggaaagctatccccacgccaggcactggattatgggataacagctatccatcaggagctgaccaatgtgggaggactgtccatagcggagaacatttttctgggaaatcaaccgaaaaagaacaaaataattgattataagaccatgttccgggaaagtgaaaaggttcagcttcaggttggcttagaatatcttccacccaccaccaagatgtaccgtttgtcatcagcagaaagacagctcgtggaaattgcccgggcctatgccaagaatcttcggattataattatggacgagcccacctctgccctgaatcaggttgagaccgataagcttatggagatcatccagaagctgcgcagggaggggaaaggaattatttatatttcccataagctggatgaggtatttgctatttctgaccgggtacaggtgcttagaaatgggaaaagtgtatatacaggaaaaagggaagagaccaccagggatgccattattaccagtatgtgcgggcgggaactgaaggatatgtacccggtgaaaaagcgtccgctgggagaagttgttctggaggtaaaggggctgggggatcagtttttaaagaatgtaagcttaaatgtgcgaaaaggagagatcgtgggtctctatggccttatggggtgtggaaattcggagatcatagagagcatcttcggagccagaaaatttgaaacaggggaaatctgggtaaacggggaacgaaaagagattcgttcccccaaagatgcaggaaagaattccattgcctatatacctgcagacagaaaaaaagagggactcatgctgtttcacaatgtgcgcacaaaccttaccattgtcaccttgaaaaattataaaaaaggcatttttctcgacttgaaaaaggaggctcagggagccagatcctggatcgataagcttcaaattaaaacacctgggctggaggctgttgtctccaatctgtcagggggcaatcagcagaaaatcgtcattgccaaatggatggccaataaacctaaaatttttctcctcaatgatcccacaaaaggaattgatgtgggagcaaaggtggagatctataaggaaatcgaagccctctgtacaggcggctgcggggtgctctatgtggcctctgagcttccggagcttctggggatcgcggacagagtctatgtggttcatgaaggggaggtaaccggagaatttgaaggagatgagatcactcagaaaaatattatcgcaagtgctataggagaaacggaacatggataaaaatgtggatgtcagtagaaataaaagtgtatctgtactggtgaaaaaggctgtaagttcctacggaagtgtactgatcgccgtaattgccctgtgtattatttgttcctttgcctctccctattttctgaccgtaaacaacatgaagaatattggggtgtacatggcggcatccggtattatcgcggccggagttacggtatccatgctgcttgggggcctggacctgtcccagatgtccataatggcatttgcaggtatttgtgtgggactggcttacaatgcgggggtccgtggcgtttggcttctgctcattgccttgggcgttggattatgctgcggcgctgtgaatggttttattattaatgtcatgggaattgacatgatcatcaccaccataggaacccagcttgtgttcagagcactggcctttattgtgtcagacggaaattttatagttatcaatgatgattttattaaatggattggcaggggaaaaatcctgggcctgtccgtgatgatctggatcatgctggcagtatttattgtagttggcattgtgctgaaatatacccagtttggacgaaatgtgatctgtgtagggggaagtccccaggcagcattcttgtctggtatcaatgtaaagaaaacgaaagccatcgcttttcttatctcagcctcctgtgcgggcttgtcctccctgttgtttgtggcccaggcaaatgtgtgtgcgccaaatgcggggaatggaagtgatatggactgtatcgcggcagtgatcatcggcggtctgtctgtgagcggaggaaagggaacgatcatagggactgcgttaggaatggtatttttctctgtgcttgccaacggaatgggccttttaagtatgggaagctacgcccagatgctcataaaaggcgtgcttctgcttctggcagtctttatcgacagtgtgagaagcaagaaaaataattaaggatcatccggctgtgaaagggctatgggttcccttaataaacccaaatattgtaaggagcagcataacaggattatgcatgaaggatagatgatgaagaaaaaagcatgtgaaatgacggtaaaagaactggcttcttatatagaccagtctgtattaaagcctgaatttactcaggaggaaatccgcagatacatacaggagggaattgattatgggtgcagaacggtgtgcgtaaaccctgcctcccttcccattgcggcagagcttaccaagggaacctacacaaaaatctgtgtggtatgtgattttccctttggcttgtccacaactgcctcaaaggttcttcaggctgaggaatattgcaggcggggagatatctttgaattggatattgtggcaaattatgggtggatacgaagcaagaggttcaaagaagtggaagaggatattcggccagtgtgtgaggtgtgccacaagtatgatactgctgtgaaggtgatcatagaaacagatgctctcacagaggaggaaattgtgcaggccacagaggcagttgtcagggcaggagcggattttgtgaagagctctactggtttttatacaggaggtccctgtgtaggggccactaaggaagtagcggacctgatgataaaggcggccaagggcagatgtaaggtgaagggctctggatgcatccggacccaggagcacttctttgagctgatcgatatgggaatcgaccgcatggggattggttatcggtctacgccagtggttttgggaatcaataagtgacgggaggaaaaaaagatgaataatgaatatgattttcgtgtgggatttcagccctttatgctgaccccgccggcggatacacctgctggaatggcacagtatcaatggacattggaggagtgcgaaagactaggggcgagggcgatctcctttatgcctaattttattcccaaggatgcctcccaggatacctttaaagagatgggagccatggccagagagaaggatgtgaagcttttgacctattctctgtccgtgtggagcctggccggaaataccccgattttaaaagggaatccctttgcctcccaggagcagggagaagcaagagcaggcgtggagcggatggttgaaattgccaagcttctggactgtgatattatgtgtgcgggatatggaatgctgaacgtgagaaccagcagatataataaggaatttccctatgaggagcagaagaagcacatcatcagctgtctcaaggaaatgtcaagaatcttggacgggaccgggattacctttgcctatgaaaaccactgtgatttcacaggcagagagatcgcggggattatagaagaggtggggcaggacaatatccgggttcaatatgattttggaaacggggccattgtgtgctgtgatcccatggaggatattaagtatctggctccctatgcggtgtctgctcattttaaggactttcaggtgatcgacaatcctgatgtaaagccggactggccggatatgcccatgcggaccacaggctgctatttgggagaaggctttgtggacctggagagaatcttggcccaagttatagaaaaagcgccaaatcccaagggaatgtgtctgttggcagagcctgccttccagcttccccagaccgatgaggagagggcggatctgaaggaatttgacaggaaggtaaccagacagtatgtaaagaaaatgctggagatcgtaaagaaattctaaggagtcacggactacagcagggaaagggggaaaggaaatatgaaaccattagggttaggtgttgtaggggcaggtgtcattgccatccaggcaatctttgaacatttccaattaggagatttgaaggaacgggtgtatttggaagcagtgtgcgatccggttttagacagggcagcagaggcagcaaagaaatatggaattcagaatgcctatgaaactttggaggagctgctggaaaatcccaaggtagatattgtatcggtatgctcgcccattgctcttcactatgaacaaggcctgaagatcatcaaggccgggaaaagcgttcattttaataaaaccatggctcttactgccgcacaggccacggagcttattgaagaggcacaaaagcgagacgtgaaaatcgtggcatctccgggaatgatgctgtggcctgccaatcggaagatccgaaaagcaattctgaaggatgagctgggagcggttacctgggcaatggctggggtggagggtgttctgttctatcatttaaatgaagagaccaggaaaaaaggagggattcttcctacctggtattataagaagccttcaggaggtccccagtatgacagcacctcctatgctcttcattctataacaggagtaatgggaccggccaagcgggttgcctgcttttccggccagatcatgaagaacttccagttcggggatcagaagatagaaagtgaagtggacgacaatattatgatgatgctggattttgggaattccgtttttgggatcatctattctgccctgaagggggagccctttaacgggtttacaccagccgtttatggaacaaagggtagtgtttttaatggaaaaatgaaaaacgagcccatgtttcagcagccctatgagatgtttctgtttccaaatattactccggagcatcttaagcttcctcagccgcatgtgttcgcagatgtgatgcagctggtggatatggtgagagaaggaaagggaaccgtggcatctgcccagcatgccagacatgtgatagagattattgaggctggctgggaagccgcaagaacaggaaggacaatagagctgaaaactacatttgagccagcagccctggaggaactggtataaggagaagcttgccgcggatcagattccagagggaatcctccgcggcaaaaattttatttagaagctattacaagaaaggggaaggtgacaggtctatgaaaattattcagataggaagcgggggctgggctcaggggtggctgcagtttattcatgaggatccggaatgtgagctgacagcccttgtaagccgtggcggtcccaatctggaggcagccagggaaaaatgggggattccaaaggaaaaatgtttcacggacatagaggaagccctgaagctggaatgtgacctggtgcttgtggccgtgcctcacagccagcacatcgcttttggaaaaaaagctgtggaggcagggaaaaatgttctcattgaaaagcccttatgtgaggatttaagagaagctgaagaatttgtggagtttatgaagggacgtccccaaaaggcatgggtgagccagaattatcggttccggcaggagctgtggaggatcaaggcttccctgggagaggacaagggctgcattggaacccctgcctgggcagatgttgccttccgcctgggaaccagcaccctgaaaaatgatccggagacagcctggcagagggcaagctggaggaagacgcagacaaatcttcttctcattgaaatctgtattcatcattttgatatgatgcggtttttggtggagtctgaattaaggtctgtatatgcccgcacctggacacccaagtggagtgatctggagggggaccaggcggctatgatgattctagagtttgagaacggttttcgggtgaattattctgccagcacaaagtccatagcctatgaaaccggatatcaatgcaattggatgctgcagaccaaccggggagctgtacggtgggaatatgacaaccaggcggaatttcaggcggccctaaatgaaaactgttggctgaaagaggattacgatttccctgggtttgaccgtgggggagttctcaacgaattgaaaaaggagctgaagggacaggaaggaagtgtccccacggcagcggacaatctaaaaagcctggcaataagctttgctgcctgccggtccatggaggaggggcggcccgtttatttgtcagaaattctatagaggaggaagctatgaaggacggtaaagtacaggtggccattatcggagcgggaactgtggccagagataatcagcttcctgcatataaaaagtgtcaggatgcccaggtggttgtgatctgtgataaaaatcaggaacgtgcccaggctctggccagacagtttgacattccccgtgttacccaggaggtggaggacattctcacagatccacacattgacggggtgagtatctgcacaggcaacagcacccatagtgacctggcggtggccttggcacaggccggtaagcatattttgtgtgaaaagcccatggccatgaatgtagagcaggcagaacagatgtgtgaggcggcacagcgaaatcatgtgatttttatgatggggtttgtaaaccggttccgcagggagagcggaatcattgaggaatttgtcagggaggggaaattaggagagatctaccatgcaaggtgcgggtggctcaggcgcagaggcacgcccagagggtggtttacagatgccgctaagtccgggggagggcctgtgatcgatattggggtgcatgtcattgacctgacctggtatcttatgggaaggcccaagccggtctctgtgagcagtgtggtacataaaagaatcggggatttccacaccagatatgtggaccggtggattgccggggagcccaatcaggcggtgacaaccgaagactctgccacggcattgatccggttcgcgaatgatgtttctatgactgtggatgtgagctgggccataaatggccgggaggaggaaatgtattccaggctgtacggcaccaaagggggcgccagcttgtctcctctggagttttatggtgaggaaaatcagattctcatggattggaagccgtgcctgaattccttgtcaggctggcagcctgcttttgaggcggagatccatcattttgtacaatgtgtgaagaacaaaaccgtgcccttggcttccgcccaagacgggcttactgtgcagagaattttaaatggcatctatgaatctggaagacaggggagggaggtttcgctggcggattaattttattaagagagagcggaggcgtttatggataagcttaaatttaaagaaggatttttatggggagcatctgcggcggcgtttcagattgagggggcctggcaggaggatgggaagggagagagcatctgggaccggtactgtcatattcccggaaatgtgaagaatgaggatacaggagatgtggcctgtgaccattaccatcggtataaggaagacattgcccttatgaaggaactggggattcagtgccagagattgtcaatctcctggcccagaattatcccggatggaaagggagaaataaataaaaaggggattgcgttttatgaaaaggtaattgactgtatgctggaaaatggcattcagccttttgtggtcctgtaccattgggatctgccccaggcccttcaggactgtggaggatgggccaacagagacacagccaggtattttgaaagatttgctgcctgtatgtttgaggccctgggagataaggttccttattgggccaccattttggagccacaggtggtttcctataatggaaattggatggggaatatggcaccgggaatcaaggatttttccaccgcactggcagttgcccataatctgctcaggggccatggtttggctgtgagaaaattccgggagatgaacaggaaggggaaaattgggatcatcaattatctaccgtacacctatccggcctcacagtcaagggaggatcaggaggcggcggtgcgtcatgacggagcctggtgcaggtggttcctggaccctgtttttaaagggacttatccggcagacatggttaaatggtatcagcaggatggcttggtggtgcttccccacattgaaccaggggatatggagatcatcagtactcccatggattatctgggtgtgaattattattacagtgattttgtggaacaggggacagatatctggcctacaatggtacgtatggccaaaccgccggtaaaggaacggaccatgatggactggtgcatttatccccaaggcttctatgacacactaatgcgggtgaaaaatgagtatggcgccaaaattattgtgacggaaaacgggggcgcttttcaggaccttgtggactggcaggggaaggtgcaggatcccaaccgtgtcagctatctgcatgagcatatcaggcagatgcaccgggcagtggaagatggcgcagatattgacggctacctggtgtggtccattatggataattttgaatgggcctttggatatgagaaacggtttgggttgatctatattgattatgaaagccagaaaaggatcattaaaagcagcgggtattggtaccgggaggtgatcaagaataacggcattttttcaatggaagaaaagcatccagggaaagctgtgtccaatgggaggggtgaaagaattggaaagatgtgaggaggctgttcttcacaggctgaaagctccccgaaagaaggcaaaagcctgtattggaatggatggctttgtggacaggatccttcatgtggtaaagaaacggacggacagtgaacattttgaaagagtagaatttcttgaggaatatggaaaaaggatcatggaagccgcagggctgagcctgaatatggagatggttcctgaaaacatcaaattcggaggaaacggacctatcatggccagcgcactggcacggctgggagttgatacaagctgtgtgggaaccttaggagagggaaccattcatcctgtttttgaagaaatggggcaggtgagcctatacagtctgggggaaccggcaaataccgatgcggtggaatttttggatggaaagctcatcgcctctgttctggacagccttaataaaattacatggaagaccataaaggaaaaggtgggtcttgatacgatcaagcgtttatttgatgaggcggacctgatcgccatgaataactggacaatgatcccttccatgacggaaatctggggatccatgatagaagaagtatttccttatttaaaagccagggataaaaaacgaatcctgttttttgatctggctgatccagggaaacgggagcaggcggatgtagcccgggcactttccacgatacaagagctggggaagtttggaagggcagtgataagctgcaatgaaagggagcttcagcttttggcagaggcacaggggcaggacaggaccctggagctggaaaagctggctgagagggtgaggcagaggctggatctggactgccttgcggtacacagactaaaggaggcctttgccgtcactgaacgagggatttccaaaggggccggctggtataccccaagacctagaatcaccaccggaggcggggaccattttaacgctggattctgtttcggccttcttcaggagtggggcatggaagagtctctttacttgggaaatctggtatctggctgttatgtgcgcacctgtgtcagccccaggtgggagcagctcatacagaccctggaaaattggaaaaacgtaaaaacccagccctgacaggacaccgtgatcagggaatcgtttgtcccggaaaattccagaaagtttttcccgcagatcccagaaaatttttcttgaatttttcctaaaaatcatttaaacttggagcagaaaataaaacaaccgtatggaatccggtgtatgccggattcccatgcaagccttcccgcatcaaaacaggcggggaggctttttgtatataaaccagatttttatgataaagaaggaggaagttcctatggaacaaaatcgaatgcgggaaaagccggttctgccacttttaatatccatgtctgttcccgtggtgctgtcaatgttgattcagtccttatataatattgtggacagtatttgggtgacacgtcttgggacagatgccctgacagccgtgtccctggcttttcccctgcaaaatgtggtcatgtccgcaggtgtgggcgtgggggtgggcatcggctctatcatctccatgagtctgggagccggggagcaggaaacagcggaccgtaccgcctctcttgggattgccctggtgtgcgtccactgtgtgatctttgccctggctgggctggtggtcactaggccctttctttccatgttcaccaaggatccgcaggtgttggaattgtcttgtgactatacttatctggtgctgtgcctgtcctttggagagcttctgcagatgtgtctggagaagatctttcagggggtggggcggatgaagaccaccatgtaccttatggcaagcggatgtattatcaatatcattctggacccaatccttatttttggctggctgggatttccggccatgggagtgaagggggcggctgcagccactgtcattggacagatcggtgcctttcttctctatgtggtggtgtgtctgcgaaaaaatatcggggtgagcatccggatgaaatatatgaaaccggataagaacctcataaaaaggatctattccattggcattccttccagtatcatgctggctatgccatcccttttggtggccattttaaatgggatcctggcggggctggacggggtgtatgtggcagtatttggtttgtattttaaacttcagacttttatcaatatgccctccaatggtctggtccaggggatgaggcctattattggctataactatggagcaggagagatgggccgggtgcgtttgaccattatgtacagtatgaagatcgtggcagccattatgctggtaggcaccattgccgccgtaggcttcccggggcttatccttagggcctttgacgcagatcccaagcttatggaatatggagtgactgcccttcgggtgatcggacttggctttttagtatctacagtgggaattgtcagcgccggtgtcttcgaggcattgggaaggggaaaagagtccctgttcattacgttgatccgtcagttccttattataatacctttgggctggctgttgtccaaaagtctgggtgcgctgggaatctggatggcttttcccattgcggagacggccgccgcctttgttgccctggcaatgctgaagagggcaggcgtactggaaaagaacagtgagggctgcccctgatcctaataacgcatatattcttgcaaatccttctgaaactggctataatgaatgaaagcagtaaaacaaaaagatagtaatttaagaaatcacagcacaaaggaaggtatgtgatgagtgcacagatagtcaccatgacaagtgaagaaatggatcaggcggccatagacaaggccggagagattttaaaagccgggggcctggtggcctttcccacggagaccgtctatggtctgggagggaacgccctggatgcatctgcgtccatgaagatttacgcagccaagggccggccttcggataatcccctgattgttcatatagcggaatattcagcgatggaggccattgtggaggcagttcctgccaaggcaaagcttctggcagacaaatattggcccgggcccctcaccatgatcctgcccaaatcccccaaggttccctatgagaccacaggagggctggacagtgtggccgtgcgttttcccagccaccccattgcaaaggcggtgatcctggcggcgggcggttatgtggcagctcccagcgccaacacctctggaaggcccagtcccaccacagcagcccatgttcaggaggatctgggagaggcggttgacatgatcattgacggaggtcaggtgggcatcgggatcgagtccaccattgtggattttacagaggagattcctgtggtgttaaggccagggtatatttccctggaaatgctccgggagaccttgggagaggtaaatatggaccagggccttttaaagacagacagtaaggtgcggcctaaggcacctggaatgaaatatcgtcactatgccccaaaggcagagctttccattgtggagggcgaaacacagaaggtcatcggcaccatcaacggttttgcacaaagtgcccgggaccggggagaacaggtggggatcattgggacagaggagaccatttcccagtatccctatggaattgttaaaagtattgggagcaggaaggaagaggagagcattgccctgcatctctatgaggtgctcagggaatttgaccagtgccaggtatcggccatttactcggaagccttttacacgccccagttgggacaggctattatgaaccggcttttaaaagccgcaggacataaagtgatacatgtataggaggagaaagctatgatagcaataggatgtgaccacggtggttatgaattgaaactggagattttgaagtacctggatgaaaaaggtctggagtacaaggatttcggatgtggcagccctcaggctgtggactatccggtgtatgcaaaaaaggtgtgcagatccattttggcaggtgagtgtgacaagggaatcctcatctgtggaaccggcatcggaatttccattgccgccaaccgatttaaagggatccgttccgctctctgtacggactgcttctgcgcagaagccacccgtcagcacaacgatgccaatgtactggctctgggcggccgtgtggtgggccccggcctggcagtgaaaatcgtggataccttcttaaacacgccgttttccaaggctgcaagacaccagaaccggattgaccagattgagacagaataggccggccgctctgtgaacagtgacagaatacggcggcaggatataaaggagaggcagtatgagcggcaaaaatgaaaaacgaatggatcacatctcctgggatgagtattttatgggagttgccatcctgtcaggaatgcgctccaaggaccccagttctcaggtgggcgcctgcattgtcagcgcggacaacaaaattctgtccatgggctacaacggatttcccattggctgctccgatgatgaatttccctgggcgagagagggagaggccctggacacgaaatatctctatgtgacccacagtgagttaaatgccatcctcaattaccggggcggcagcctggagggggcaaagctgtatgtatccttattcccctgtaatgaatgtgccaaggcgatcatccaggcagggatcaagaccattgtgtacgactgcgacaaatatgcggacaccccctctgtcatagcctccaagcggatgctggatgcggcgggagtgcgctattacaagtacagccgtactggcagggagatttcttttaccgtataataataaggaaaatggaagctcttgggagcttgggaaataagaagcccatatacaaaacaccggacttgttttttgtcaggacggctccaggatggacggggatttttataaatcttccgtccaccctggagccgtcctggtttttggacctgatggaaggcagctgggcagggtctgtgtgaaaacgggctgcctgcattctttttgtgaaaaaaatatgaaaatgcaaaaattttatcaagaacctattgacaaagcatttgtccagtgatatcttaagaccatagatgttagcactcctttaaactgagtgctaataatcaaaagaagggagcgagggtgttggataaggaattggatgaccggaaaaagagaatactgaaagccatcatcaagacttatctggaaaccggagagccggtaggttcccggaccatttccaagtacaccgatctgaatgtgagctccgcaacgatccgcaatgaaatgtcagacctgacggatttgggctatatcattcagccccacacatcagcaggaagaattccttctgataagggataccgcttgtatgtggatgagctgatgcatgagaaggaagaagaaattgcggagattaataatcttatgattgagaaaactgataaaatggagaaggtgctcaggcaggtggtgaaggttctggcctccaacaccaactacgccaccatgatatcagttccccaatacagcggaagcagattgaaattcattcagctttccagggtcaacgagctgcagttggtggcagtggtggttgccgaaggaaatgtggtgaaaaaccagatcattaatctggtggagcctatgaatgatgagacaatcttaaagctgaacctgctgctgaacaccaacctgaacggccttcccattgcggatatcaatctgggaatgatcgccaggctgaaggagcaggcagggatccacagcgctgtggtgggcaccgtgctggacgcggtggcagagaccatttctgtggatgaagatgatgtagagatctatacctccggagccacaaatattttcaaatatccggagttggctgataaaagccgggccagcgagctgatctccgcttttgaggaaaaacaggagctggccgcactggttaagaataccctggaggaccaggaaaacacagggatccaggtgtatatcggggacgagaattccagccagaccatgaaggactgcagcgtagtcaccgccacctacgagctgggggacgggatgcatggaaccattgggatcatcggtcccaagcgtatggattacgagcatgtggttgacagcttgaagacattgaaaactcaactggatgatattttcaaaaacaaaacctagaaaggcggtatgagacgtggcagaagaaaacaagaatcctgatatccaggaggaaaaagaaacttcccaggaaacagccactgaggaaacaacagacagtcaggaagtgacagactcccaggaggagaaccagcaggaggcgtcagaagacaacacctccggagaagaggaagtctgccaggaaagcaaggaaaaagagaaaacctctttcttcgggaaaaagaaaaaggaaaaagacaaaaaagaccagcagatagaagaactcacagacagactgaaacgaaacatggcggaatttgacaactaccgcaagcgcacagagaaggaaaaggccagcatgtatatcatcggggccaaggaaattgtggaaaagatgcttcccatcgtggacaatttcgagagaggtctggcccaggcaacccagggtgatgcctttgcagacggcatgaagatgatctacaagcagatgatgacagccttagaagaattgggggtaaaacccattgaagccgtaggcaaagaatttgatcccagcttccacaacgcagttatgcatgtggaggatgaggaggcaggagagaacatcattgtggaggaattccagaagggatacacctacaaggatttcgtcatccgtcacagcatggtaaaggtagctaattaagaaggcgccttataacatatagagtgttaacaaaatcttattgagaatgatttaggaggataaaatcatgggaaagattattggtattgacttaggaaccacaaacagctgtgtagctgttatggaaggtggccagcccaccgtgattgcaaatacagaaggagcaagaaccacaccatccgttgttgcttttacaaagacaggagagagactggtaggagagcctgcaaaacgtcaggcagttaccaatgcagagaagaccatttcttccatcaaacgtgagatgggaactgattatagagtaaatattgacgacaagaaatattccccccaggaaatttccgctatgatccttcagaagctgaaaaaagatgcagagggatatctgggcgagcctgtaaaggaagccgttatcaccgttcctgcatactttaacgatgctcagcgtcaggctaccaaggatgccggcaagatcgctggacttgatgtaaagcgtatcatcaacgagcctaccgcagccgctctggcttacggacttgacaatgagaaagagcagaagatcatggtttatgacttaggcggcggtaccttcgacgtatccatcattgagatcggcgacggtgttattgaagtattgtccacagccggaaacaaccgtctgggcggcgatgactttgaccagaagatcacagactacatgctggctgaattcaagagaatggaaggcgtggatctgtctggggataagatggcccttcagagactgaaagaagctgcagagaaagcaaagaaagagctttcctccgcaaccactacaaatatcaaccttcccttcatcactgcaaccgcagagggacccaagcattttgacatgaacttaacaagagcaaaattcgatgagctgactcatgacctggttgagaagaccgcagagcctgtgcgccgtgcactttccgatgcaggcctcaccgcttccgagctgggacaggtgcttctggttggtggttccacccgtattcctgctgtacaggaaaaggttcgtcagcttaccggcaaggagccaagtaaatctttgaacccagacgaatgtgtagcactgggagcttctgtacagggcggcaagctggccggcgatacaggagcaggcgacatccttcttctggacgttactccattgtctctgtctattgagaccatgggcggcatcgcaacaagactgatcgagagaaatactaccattcctaccaagaagagccagatcttctcaactgcagccgataatcagactgctgtagatattaacgtggtacagggcgagcgtcagtttgcaagagacaacaaatccttaggccagttccgtctggacggaattccgccagcacgccgtggagtgcctcagattgaagttacctttgatattgatgccaatggtattgtaaatgtatctgcaaaagacctgggaacaggaaaagagcagcacatcaccatcaccgcaggctccaacatgtccgattctgagatcgacaaggctgtgaaggaagcagctgagttcgaggcacaggacaagaagcgcaaagaagccatcgatacaagaaacaatgcagacgcaatggtattccagacagagaatgctctgaaggaagcaggagataagctggacgcagcagacaaagccgctgttgaggctgacttaaatgcattgaaatccctgttggattctaccaaggatacagagctcaccgatgcccaggttgctgacatcaaggcagcccaggagaagatgatggaaagtgcccagaagctgttcgctaaaatgtatgagcagacccagggtgcaggccaggcaggccccggaccagacatgggcgccggcgcttcccagggcggcagtgaggcaggctacggagacgacgtggtagatgccgactacaaagaagtttaaagaaatccattataggaatgaatgacaatggctgaaaagagagatttatacgaagtcctcggcgttgacaaaactgccgatgatgcagaactaaaaaaagcatatcgaaaattagccaagaaatatcacccggatgtgaatccgggtgataaagatgctgaggcaaaatttaaagaggccaccaatgcttacgccatcttaagcgatccggataagagaagacagtatgaccagttcggttatgcggcctttgaaaacggtgccggcggtgcagggggcggcttcggcggctttgacttcagcggtgcggacatgggtgatattttcggtgacatttttggtgatctgtttggcggaggaagccgcagaagagccaacaatggacccatgaagggggcgaatctgcgcgcccggatcaatattacctttgaagaggctgtttttggctgcgagaaggaattagagattgcattaaaggatacctgtaccacctgtaacggtacgggagctaagccgggtaccagtccccagacatgtcccagatgtaatggagaaggccagatcgtctatacccagcagtctatgttcggtatggtgcggaatgtgcagacctgtccggagtgtaatggtacaggtaaggtgatcaaggacaaatgtaccacctgccggggaaccggatatacctcttccagaaagaaaatacaggtatcagtgcctgcgggcattgacaatggccagagcatccggatccgggataagggagaaccgggcaccaacggcggtcccagaggggatctgctggtggaggtgaacgttgcccgccatcctattttccagcgccaggatatgaatattttctccaccgctcctttgacctttgcccaggcagcccttgggggcgaggtgaagatcaatacggttgacggagatgtggtatatgaggtgaagccaggtactcagaccgacaccaggatccgcctgaagggcaaaggtgtgccttctctgcgcaacaagagtgtccggggcgatcactatgtgacattggtggttcaggtgcccaccaagctcaacgaagaggccaaagaagctctgcgcaagtttgatgcagcctgtggaaacaggccagtcaccacagaaggaacatccggcactggtacagagaagaagaaaaagagctttatggataagctgaaggaaacctttgaagaataacattgacaaataagtcgggatatggtatcttttaaacaaagttagccatatctaacacaagcgatggctgtctggacagggcagctatttcttttttacgaatgagttagttaaaactaatcaaggagaggtgaccatatgagtgtagtgatcgtaggcggaaatgagagaatggtatgtcaatatgaaaccatctgcaaaggttatggatgcaaggccaaggtttttcccaaggagcggggagccctgaaaaagaagattggggtaccggatcttttgatcctgttcaccaacacagtttctcataagatggtgaattgtgcggtggatgaagccaaacgaaaagatattccggtgtatcgctgccattccagcagtgcagccgccttggaaggcattctcaaggagtgctgccagggttaataatctataaaaatctgtgaagaatccattcttgaacttgacagaaaattgccaatggggtatcttgatatataagatatgaaggattttaagaatggagggcactatgaccttagaggaatttgcgcaagaaacaaatatgaatttggaagaagtactggctcggttcgcaggcatggaaagtctggtaagccgttttataaagaaatttccgggagatcccagttttgcccagcttcaggaggccgtggaggcgggagattatgagagcgtggagaaagctgcccataccttaaagggggtggccgggaacctgggctttaaccgtttgtttgaaattaaccagcagatcgtggatgcggtgcggcagggacacagtgaggatgtgcaggatttttttcagcaggacaagacggaatatgagaaggttatccgagccattggagagcttatgtaaatggagaaaagggaaagaatcccttttctttttttggtaattcgtgtatgataataggatgatgttgagacagagaataagaatgcaggataactcctgggaataaggaaattctgacaggacagggatgaagaggatatgagtgcagggattgtttttcagcagatgctgatgatttttattttgatcctatctggatatatactgaacagaaaaggactgtttccggagggaacctccaagggaatgtcctctcttgtggtaaatgtatgtaacccggccatattgctgtccagtagttttcagagagatcccgggatgacaaatgccatggtgggagcagctgtggcagcgggtgcggttttatatgtggttctgattgcggccggacttcttgtgcccaggcttttgagagtggaaaaggactgccgggcgcagtttaatatgatgtgtctttttggaaacacaggatttatcggaatcccggtgattgcagccgtggtgggacagcaggcgctgatctatgtggctattattaatatttattttaatcttctgttatatacatacgggatcgttctggttgattccaaaggcaccggaggcggcttccagtggaaaaagctggtgaatgtgggaaatgtggcatgtgtgctgacgattttggtatttctcttccagcccagcgtgcctgaggtcattcccgagactttgaattatatgggacaggccaataccatgctggccatggtggtcattgggatttctttgtccaggacaccgataaagaagctgctgggagatttgcggatatacctttttattgttatccggtttgtggcaattcccattgttcttgccttgttttttaggactgtgatcaaggacagggacctgtattataccatggtgctgttaagcgccgttccggtggccaacatgcctttgatgctggctgaggagatgggtgtggatggggagctgctgtccagagggattattttgagcacccttttttccctggtgaccattcctattgtggctgtgtttgtgtagaggagtgaaaatttgaagacaagagggaaatcaaacctgtggaaatttcttccctggtgggccatactgcccctgctgacaatttggggagccaactctctgatctactggggaagcgatgttttgacaagcagtctgcatcattatgattttacaatggcagtggatcgtctggtgccctttgtgccggagtttatatggatctatgtgctggcctttcctttttgggggctcaattatattctggcggcccagcaggggaaggaggccttctggcggtttgtggcaacggatctgaccatccatgccatctgctttgtgttttttgtccttctgcccaccaccaacgtaaggccagagattctgggggacagcctgtcagaacagtttctggcttatatctactccatagacggaggaaacagcccttcaaatttgttcccctccatccactgttatgtgagctggctgtgtgtgtacgccgtgaaggatcagaagaagattccaaggtggtataagatcttttctgtggtatttgccgttttgatcattatctccacacagactttgaagcagcattactggattgatgcggcggcgggagtgctcctggtggagttcttctggcggttttatcagaagggatacagatacaagccctttgaaaagttttttggcacatgcaataaatggatctttcagaagctgggaggaaaaattctaaagagagagtgaatcctccttgtaaaaatagacagtcaaattatacaagaattggagtgatacctatgaagtggaaccgttatacagtgaaaaccaaaacagaggcagaggatatcgtgagctgcacccttcaggagctggggatccagggcgtggaaatcgtggacaagaagcctctcacagaagaagaaaagcagcagatgtttgtggacatcatgccagagggccctgcagatgacgggattgcttttttgaacttttatctggatccccaggaggatcaggaggccatgctgaaaaatgtccgggaggctctggatgagctggctggctttatggatatcggggaggcttccatagaaacgtccgagacagaggacaaggactggatcaacaactggaagcagtattttcatcagttttatgtggatgatattctgatcatcccttcctgggaggaagtaaaggcagaggatacgggccggctgatccttcacattgatccgggcacagcctttggcaccgggatgcacgagactacccagcttgttatccgacagcttaagaaatatgtaaagccggatacccagatgctggatgtgggaacgggaagcgggatcctgggcattgtggccttgaagctgggagccgcccatgtggtaggaacggatctggatccctgcgcggttcctgctgtggaagataacaagcaggccaacaacataaacgaggaaagctttgatttgatcatcggcaacattattgatgataaacaggtgcaggaccaggcaggttatgagaaatatgaccttgtggctgccaatattctggcagatgtgctggttccccttacccctgtggtggtgaaccatatgaaaaaaggagcttattatattacctccggcattttggatgtgaaggaagagacggtaaaacaggcggtgacggcggcaggcctttctttggtggagatcacccatcagggagagtgggtctgcatcacggccagaaaggactgacccatgcttcgtttttttgtggaggattctcaaattcaggagcaggagcacagaatctccatcacaggcagggatgtaaatcatattaagaacgtgctgcgtttgggaaaaggagaagagctgtggctcagcaacggacaggacaaggaatattactgtaccattgaggcgctggaggcagagcagatcctgtgccatatccactatgtacaggagccctcctatgagctgcctggaaaaatctatctcttccaatgtctgcccaagggggataaaatggagctgatcattcagaaggcagtggagctgggagcttatgagatcattcctgtggcctccaaacgctgtgtggtgaagctggatgaaaaaaaggctgcaaagaaggtccttcggtggcagcagatcgctgaaggggccgcaaagcagtctaagcgcatgcgggttcctgtggtccatgaggtactgtcttttaaggaagcccttgattacagccgttgctgtgatcagaagctgatcccctatgagctggcccgtgggatgaaggaaaccagagaggtgcttcaggggattgcccggggacagtctgtggctgtgtttatcggcccggaggggggatttgaggaggaagaggtggaaaaggccgcagaggccggagccgctcccataaccctgggaaaacggattttacgtacagagacagcagggctggcgcttctgtctgtgctcatgtttcaattggaggaagaatagatggaagcctattttgataattctgccactacccgctgctatccggctgtgacagagattgtagtaaagacaatgacagaggatttcggaaatccctcagccatgcatacgaaaggtgtgcaggcagagaactatgtgaagcaggccagggaaaagctggccaggatcctgaaggtacaggacaaagagatcctgttcacctccgggggaaccgagtccaacaacctggccctgatcggcggcgctatggccaacaaaaggaagggaaaccatgtgataaccacatcagtggagcatgcggctgtgggaatgcccgtggcccatttggaggagctgggttttcaggttacggttctccctgtgaactcccagggggtggtgtctaggaaggctcttgaccaggccctgaccccggataccatcttagtttctaccatgtatgtgaacaatgaagtgggagcagtgatgccagtggaggaaatgggaaagctcatccatgagaagagtcccaatgccttgtatcatgtggatgccatccaagcctttggaaaataccggatctatcccaagaagctgggaatcgatctgctcagtgtgagtgctcataagatccatggccccaagggcgtgggatttctatatatcaatgagaaagccaaggtgcagcctcaaatcctgggaggcggccagcagaacggaatgcgctcagggacagacaatgtgccgggcattgcaggactgggtgtggcagcagaagagatttaccaggattttgacaccaagatccgccatctctatgaactgaaggaacggatgacccagggactgttaaagatagagggtgcggtgatcaatggaatgccggttctggaaggtgcgcctcagattgtgaatgtgagctttccggggatccgcagcgaagtgctgctccatacattggaggaccggggcatctatgtgtctgcaggaagtgcctgctccagtcataaacgcaaaggcagcggcaccctgactgccatgggccttccaaaagaattaagagagagtgcggtgcgcatcagcttttcggaggagaatacttttgaagaggtggattattgtctgactgttttaggagagacagtccctatgctgaaacggtatgcacggaaataagaaggagaatattatgttgtttcatgcttttttgattaagtatgcagagattgccattaagggaaagaatcgttatctttttgaggatgccctggtgcgccagatgcgtctggctctggagcctctggacggggatttccaggtgatcaaggagcgggggagggtgtatgtgctctgtcctgcagattatgactatgaggaggctgtggaggcccttggacgggtgtttggcattgtgggcatctgtcccgtggtgatttatgacaactgcggctatgagcagatggccaaggatgtgatctcctatatgaaggcccagtacccggcctatgcagggacctttaaggtccatgccagaagggcagataaaacctaccccatgacctccatggaggtgtgtgcccagctgggaggagaaattctggaggccttccccgagtcttctgtggatgtgcacactcctcagttaaatcttacggtagagatccgggaaaaaatctatgtctattctgaaaccataccagggccgggaggcatgccggtgggaacaaacgggaaagccatgctgcttctctccggagggatcgacagtccggtggcgggctatatgatcgcaaagcggggagtaaaggtggatgcagtttatttccatgcacctccctacaccagtgagcgggcgaagcagaaggtggtggacctgtccaggctggtatcccggtacagcgggcctatgcggcttcatgtggtgaattttacagatatccaattatatatctatgaccagtgtccccatgaggagctgaccattatcatgcgcaggtacatgatgcgcattgcagagcactttgcccagaaaaacggctgtctgggactgatcacaggggagagcatcggccaggtggccagccagaccatgcagagccttgctgccaccaatgatgtatgcaccctcccggtgtaccgcccggtgatcggctttgacaagcaggagattgtggagatctctcataaaatcggtacctatgagacttccatcctgccttttgaggactgctgtaccattttcgtggcaaagcatccagtgacaaagcccaatatcaacattatccgcagatccgaagagcgcctggctgaaaagatcgaccagcttatggaagaggccattgccactacagaggttattgaaataaaataaaaggctgttttatagaagccagaaggtttatgagaattagtccccaggaaaagaacaagggcagggatccaggacccctgcccacgaaaaaaaggcggatgactatccgcctgtatttttttcctcactattgattattcagcaatatatttggaaatgatccccataacatggtcaagagctgctccgtctgcatgaatattcagatcgatggatttggataaatctaagctgaagatgcccatgatggattttgcatcgataacgtatcttccggaaactaaatcgaaatcgcagtcgaatttgctgatttcgtttacgaaagcttttactttatcaatagagttcagagaaatttttactgttttcattgtgtgaacctcccttaatggaattagtttttttcgtttttacaagaataatcttagcgtttggcattttaaaagtcaagatgaaaaggtataaaaaaaacagctattattagtgaatatgtataaaagatgcatgaaaacagaggtgagatatgaaaggaaaagttgcccttcacaatttaggatgtaaagtgaacgcatatgaaatagaggctatgcagcagcttttggaggaggcgggatatgagatcgttccctttgctccaggggcagatgtgtatgtgatcaacacctgcacagtgacaaatatcgcggacagaaagtccagacagatgctgcacaaggccaaaaaaatgaatccccaggctgtggtggtagccacaggctgttatgttcagacagatacacagaagatggaaaaggacgaggcggtggacctgcttctgggaaacaaccagaagcagaatattgttgaggttctccaggagtatgaggcagagcgcacaaagaaggagcgcatcgttgagatcagccatgtgaaagaatatgagcccctgtctatccggcggaccgcagagcatgtgcgggcttatattaaggttcaggacggatgtaatcagttctgtacctattgcatcattccctatgccagaggcagggtgagaagcagagaccgggaagatgtcttgagggaagtgagggctttggcccagggaggctatcaggaggtagtgctcacagggatccatctaagctcttacgggctggatttttccggggagagccgggaaagccttcttacccttatacaggcagtgaatgaggtggaggggatccgcaggatccgccttggatccctggagcccaggatcatcacagaggaatttgtccagtgcctggcggctatgccaaaggtatgcccacattttcatctgtcccttcaaagcgggagttcagccacgctgaagcggatgaaccgcagatatacgccccaggagtatgaggagaaatgtgctcttctaagaaagtattatcccaacccggctttgactacagatgtgatcgtaggatttccaggggagacgccggaggaattcaaggagtcttatgaatttgtggaggggattcatttttatgaaacccatatttttaaatactccagaagaaaaggcacgaaagccgcagatatggaggctcagatcccggagacagtgaaggcagagcgcagtgacaaattcctggcactgaaccaggccagggcaaaggcatacgaggaagagcttttgggaaggcaggcagaggtgcttctggaagaggaggcagaatttgccggagagaggtatttgctgggacacaccagagaatatgtgaaggtggcagtgccggccagatcccacagaaaagtgaacgatctgtgcagggtaaaggttgaaaaattcctggataaccatgtgcttttgggagtggaataagatttccttgtattttaacggaatttatattaaaatagttaatgaaatatactttaaggacgtgagaaaaaaatggcagagaacaatcttggaaatactcagtattttaagacaaaaccagagcaggagctgaatgtgaaagaggtcctggatctggtctatgatgcaatggatgagaagggatacaatcctgtaaatcagatcgtaggatatattatgtcaggagaccccacttatatcaccagccacaagggagcccgcagtatgatcatgaaggtagagcgggatgagctggttgaggagcttctcaacgaatatatcaagaacaaatcctgggaaggctgatatgcggatactgggattagattacggatcaaagacggttggggtggccttaagcgaccccttgggttttactgcccaaagcctggagatcatcaggcgcaaggaagagaacaagctgcgcagaaccttggcgcgcattgaagaactatgcagggaataccaggtggacacccttgtcctgggatttcccaagaatatgaacaatacaataggagacagagcgcagaagtccctggactttaaagaaatgctggaaaggcgcacgggtctccctgttgttatgtgggatgaacggcttaccacagtggaggccaaccggaccctgatggaggccggtgtgcgcagagagaatcggaaggactatgtggattccctggcggcggtttttattttgcagggatatttggattccctgtctatgaaaaggaacgattatggagaaaattaaatttcagacagaagacgggatcattgaggaattttatgtggaggagcagaccaggatcggcggacgttcttaccttttagtgtctgactcccaggacgaccaggcccaggcctatgttatgaaagatatgtcagaggatacagatcctgacgcctgctacgaatttgtagaagatgaagaagaactggaagcagtttggaaggttttccagcagatgatggaagacgtggattttacaagagaataattgaggagaaagggagcgtcccttccgtctctttgatcataaataaaataaaaaagacagaaagtaaaagtaggcaatttattcttaggtgaatgagaggtgattgacgtggaggagagccgggattttcccagcatattaaaagacaagggattaaaagtcaccagccagcggctggcgatccttgaggttttagaggactcggcggataatcaccgcacggcagaggagatttatgagcttgtgaaacggaagcatccggaaataggactggccacagtttatcgcacggtgcagctgctttcggatctgcaggtgattgacaagattaatttagatgatggctgtgtccgatatgaacttgggcgtgaatacggacatgagaaacaccatcatcaccatttgatatgcctttcctgcggaaaggtggtttcttgtgaggatgatttcctggaatctttggaggcccatatattggaatctacagggtttgaagtggcggatcatgaagtcaagctctatggatactgcaaaggctgccgggaaaaccacaagccggaatagattgcacacgaattcggaggtgcaagtttgaaaaaagattggaacaacgcaaacaacaacggaaacagcaacagcacaggaggcagtgtacagaagcagccccagacaaatacggctcccagaaagccctatcaaaaaaataataataacaacacgagtattattaagaataagcagcccattgcaaagaagctggcgcccatcccaaaagaagtggtgaaggcggtaggggtgaaagcaacaggaaagaagagaggcaagaagaatgcctccaagctgaagatcataccccttggaggtctggagcagatcggtctgaacatcactgcctttgagtatgaggacagcattgtggtagtagactgcggtctggctttccctcaggatgatatgctggggatcgacctggtgatcccggatgtgacctatctcaaggataatatttccaaggtgaagggatttgttatcacccatggacatgaggaccatatcggcgccctgccttatgtgctccgggatgtgaatgtgcctatttattccaccaagctgactttgggactgatcaccaataagctgaaggaacacaatctggtgaggaccacaaagatgaaagaagtccgccacggccaggtgattaatctgggagacttctcaatcgaatttattaaaaccaaccacagtatccaggatgcctccgcccttgccatctactcaccggcagggattgtggtgcacaccggagactttaaagtggattatacgccggtatttggcgatgccatagatctgcagcgttttgcagagatcggaaaaaaaggtgtgctggctcttatgtgtgacagcaccaatgcagagagaaaagggtttaccatgtccgagcgcacggtgggccatgtttttgacaatattttcagtgagcacaaaactgccaggataatcatcgctacctttgcctccaatgtggacagggtgcagcagattatcaattctgcgtacaaatacggcagaaaggtagccttggagggacgcagcatggtgaatgtgatcaccaccgcggcagagctgggatatttaaggattccggacaataccctcattgagatcgatcaggtgaagaactatacggacgagcaggtggtgctcattaccacaggaagccagggagaatccatggcagctctgtccagaatggcagccaacattcataaaaagatcaccattaagcctaatgacaccattattttcagctctaaccccattccaggaaatgagaaagcagtgtcgaaggtgatcaatgaactgtgcagaaagggcgccaaggtcattttccaggatgcccatgtatctggacatgcctgtcaggaagagatcaaattgatctattctctggtgaaacccaaatacgctatcccggtccatggagagtaccgccatctggtggcacaggctcatgtggtggaggagcttggtatttccaaggacaacattttcattctgtcctccggggatgtgctggagtttgacgacaaggaagctaaggtcaccggccaggttcacacaggagccattctcgtggacggcctgggtgtgggagacgtgggcaacatcgttcttcgggaccgccagcatttggcagaagacggcattatgatcgttgtcatgactttggagcgccacagcaatgtggttttgtcaggcccggacattgtgtccagaggatttgtgtatgtgagagaatccgaggatctgctgggtgaggcgagaaaggtagtggaagaagcactggaatcctgtctggagaagaatattacagactggacaaagctgaagatggtagtaaaggatgcactgggagatttcatctggaagcgcacaaaacgcaaccccatgattctgcccatcattatggaggcatagatccgtcatggatgctatagataaaaatacgaagcttttgatcgctgtcattcggaaaagtgcaatatacaaggaatataaaaaacaggaggaatatctaggcaggaatccggagctgtttcaaagggtgaaccagttccgggccgccaatttccgcctgcagaatgaaagccccaaggaaaacttatttcaggtaacagaggatttggccaaggaatctgcggagctccgcaagattcctgaggtcaatgcctttcttgacgcagagttggcactttgtaaattgatgcagaagatctgtctggatttaacggaagggattgaaatgcacataccgcatgtttagcttgaacaaaggagtgtgagaaatgggaaataccaaagaacgtataggcaccgtgctggcaggaggggcatttcgtatccttttgtatgtgtgcgtggtcttcctgatgatatggatcggaaaatcaacctataagtttggatacgaaatctttaaccagcaggccatgagtcccggggagggacaggaggtgactgtggtggttaaggagggagcctctgtgtatcagattggaaagacattggagaacaaaggcctcatccaggatgctctggtcttttgggtacaggaaaagctgtccaattataaggatcagttaaaaccaggtacgtatattctgagtactgcctatacccccacccgtattatggggatcctggcgggggatgaagaacagggaggcacaggctcgtgatcgtagaggagagaatgcgcacttacatcaattctctggacggaggaaatacggcttttctggaggaattagaagcatttgcccataagacccgggtgccggtgatccgaagggagatgcagagctttctcaaggttttgctgcaattgaaacagcctggtaaaattctggaggtggggacagccattggcttctccacacttcttatgtgtgagtacagcatcgtaccagttcatatcaccaccatagaaaattatgagaagcggatcccactggctaaggagaattttaaaaaggcaggaagacagtctcagatcaccctcctggagggggatgcgggagagatcctgaataacctggaaggaccctatgatctgattttcatggatgcagccaaggggcagtatctcaactggcttccccaggttctgcggcttatggacaagggaggggtgctggtgtccgacaatgtgctccaggacggagatttggtagagtcccactatctggtggagagaagaaaccggaccatttataaaagaatgcgggaatatttgtttgagctaaagcatgatccccggctgttgacctccataatccctttgggggacggagtcacagtgagtgtgaaacaggagtgacattatgaaaaaaccagaactattagtgcccgccagcagtcttgaggttttaaagatcgcggtggtctacggagccgatgccgtatatgtgggcggcgaggccttcggcctgcgggcaaaagccaagaatttttccagggaggatatgatccaggggatcgcctttgcccatgaacatggggtgaaggtgtatgtcaccgtgaatatcctggcccataacagagatctggagggtgtgagagaatacctgaaggagttaaaggaaatccgcccggacggactgatcatcgccgacccgggaatttttatgtatgccaaagaaatctgtccggaaattgagcgccatatcagcactcaggccaacaataccaactatgagacctaccggttctggtacagccttggggccagacgggtggtcaccgccagggagctgtctctggaggagatccgtgagatccgtgcccatatcccagaggatatggaaattgagacctttgtccacggggccatgtgcatttcctattctggacggtgcctgctcagcaattttctggtgggaagagatgctaaccagggagcctgcacccacccctgcagatggaaatattccctggtggaggagacaaggccgggagaatatatgccggtgtatgaaaatgagcgaggaacgtatatttttaattccaaggatctgtgcatgatccagcacctggatgacctgctgaactgcgggatcaacagtttgaagatcgagggaaggatgaaaaccgccctttatgtggcaacggttgccagaacctatcgcaaggccattgatgattatctggagagcccaaaaaagtacgcagaaaatatgccctggtaccaggaacagatctccaactgtacctatcggcagtttaccacagggtttttctatggaaagccagattcccagtcccagatctatgacaacaatacctataccaaggaatacacctatttaggttatgtggaagaggtggatgcgcagggaagaggcaggatcacccagagaaataagttcactgtgggagagaccattgagatcatgaagccggatggaaggaatgtgcaggtacaggtaaaaggtatttacacccaggagggggaagccagacagagcgcaccccatccccaggaaatcctatatgtggatttaggcggggatctggagccatacgatattctaagaagacaggaagagcagcagccggataggcagaattctctgcctggagcgggttgatccgtagtaaaagaccgtgaacgttcacggtctttttgtttacgaaaaaagtggaggaaatcagggctttttgttggaatgtatatgcggatagtttaaaatagtactaaataaaaaaagggggattcctaaattatgaaaaaaccattagcatttttggcagcctgcggtctcaccgtgtgcctggcaagtacgggagttctggcggcagccacaactcctggagcgtctccggctgtacaggtgacacaggcagcccagaaaaattatacagtttccggacttatccattcttttgacggcaagaccctggtcatcactgacaacgaaggaactcagatgacctttgatattacccaggcagagcttcaatgtgaaaacgggattttatccgatgacgatgtgaccgtagagtatacccaggcagaggacaaggaggcggtgttccacgcagtaaaagtggtggacaaggcagatgattcctccaggaaaaagacagagctctttggcacagtagaaaatgtttctacaaatacagtgaccattcaaaacctctatggccatcattataccttttccactgtgggtgccgagacaaagagcaaaagcggcatgaaaaaaggcagcatgatcatgcttacctataaggggcaggtaaagaacggaaagaccgacaatgtgaaggtgctgtccatcacggatgaaatcgataacaaaaaactcagcactgctaaaaaaagagcagagaatactctgaaaaagcaggaagaggctaagaagaaaaaacaagaggaggaagctgcaaaggcagcagccgtaaccgctgccccggctcccaaggttaacatcacggatacggtgaaaattttgtacaattccgtggctgccaatgtaagagagagctacagcacagattccaagaaactgggcacacttccctatggaaccaccatagatgtcaccgggatctgtgacaatggatgggtgcggatcggataccagggaaagaccggttatgtatatggggatcttcttcaggagaccagaccggtggtggtggacgatcattatgccaccatgtatgcctctgcaggagtgaatgtccgttccggcgctggcacagaataccaggtacttggacagcttaacaaggggaacgctgtacaggagaccggaatctgtgacaatggctggatccgcattggttacaacggaggtgtgggatatgtgtatggagattacctcacagccaccaagccggaggagcccagacagatcgtatctgtttatggttatgtaaacaatgtgggaatgagtgcgctcaccattgatactcaggacgcggtcatgagctttgatatcggcgatgcggagatgaactgcgtaaatggtatctgcgagggaaatctggtggaagtaaattactatgcaggaaccaccatcgcagccagtgttatagacaatgaggcaaaccagatatctacccccacatttaatgatgcaggtctgcctaccatcggcggcacagtggtgggagcgaccatgagcaccattacccttatgctcaatgatggctcaactcttaccttcctgaaggatgacgcggatgtggagcttcccggggggatcatagaaggaaactatgtgtatgtggagtatgagcctgcaggggtgggcagtgtttatgacaatgcagttttaatctacttgagtttccgcaaaatgtaatttcaaaatagatataacttcccaaagtaccaacctgctggatttttgaaagaaaaagaacaacagcctgttgagcagacgcactgaaataagccccgctggaaccggactttgggagaactattcttttatctatttaagcggctaacttaaggcagagttgacggtatgccggtctctttgtccggaaccagagcctgacgccctcttttgcatacgaaagtatgccagagatacctttcgcaagccgataatagcagaagaaaactttttcctttacaggatctgctgtttttataattgcagcctttagtgcattggtttctgaaatcattgagatcattgccagaaatgccatgcatagggtgatataaaagttaagcgcattgatagcacaaagctttcgtacacggaagttttcgaattggaacatctgctttttacaacggaaatattcttcaatcttccatctggaaaaataggttcttgccacccgaattacatcttctttcgatttaatttctttgttggtggcaagcatcattggatgttctgttatgccataaacaagtaccagataaatctcttttctggatgctgtaatctgaactttcacatgggaaagataggcttcatgtttttttcctttataaaatacactggttttgatcttgccttttctacgatcgcgaagttcggtagcaggagtccattttccatggtacagaagttttcttttggaagtaaggcgaatgacataatcctgtttcaggtcatccagttttaggaacatcttgttatcgtcataaccacggtccatgcaaaaagtcgcttttccaaagagtgcagcgctctgttccattgcattaaaagtgattgcatttgcagatttatagtccttttcagaagatgaatgaatgcgagagaatatgctgacagggtgattgctggtagtaagaacacaagcttctgtgacatgatagccttttttgtatatattttttgtcgaagtgctttcagaaccatcgcggacaataccaagtgactcaaatttataaccatcgggttttacaacatcactatcatcgatgtgaatcactggttgagagggggcccattttttcaccatctgaagataggaaacagccgactttgtaggggtacctttctccagatgcctggaaagtcgatcaacaatgttaatctttttagaattctcgtgaagctggtcaacaacatctgttaagagacaacttttagccgccaacatgccgtaagtgatatccgcagtaaatttacgttcaggtttggagagcagtctagaaattttatttgtaaaagtaagaatttttcgtttcaatgtgtaagtatttgatgtaaaattagccataaggaatctccttctttttgtttagtggattattttgtggtgatttaattttacatcaaaaaggaggaagattccttatattttaggcatttattgaaagttgtttataagaacacagctaaactcaaggttgtgtggatagaactgcggaaactcaagttaatctactcttgatttttttcgaatttatgatatattaaaagtttcacttacattttcatgaaagttatgttaaaataatagtgcggcgtgtagttttgagtaacgtaaatccagttgtcagaactacacgtcctttattttttggatccgttttaataacacaccttaatgggaaggaggaaattagatgtaccagaaaggtgatttaatcatgtatggaaatgtaggagtatgcagagttgaagaggtgggtgtgccccaggggctgtccatgacagaagaaggaagagtctattatacactgacccctgtgtttggttcaggaatcatttacatcccggtgaatgccaatgtatttatgcgtcctgtgatgaccgaagagcaggccagacaattgatcttaaagattccccagatacaggaagagccctattatggaaaagaccagaaggggctggagcaaagctaccggacctctatgaacacccacgaatgtgaggatctggtccagcttatcaagaatgtgtatgtgaaaagccagaagcttacacagaacggaagaaaaccgggtaagacagatctgcagtataagaagcgggcagaagagcttcttcacagcgagctggcagttgccctggatataccagtagaggaaatccctcagtttattgagcaggaagtaaataaagtagaaatggaagcgtagggagaagactttttcccaagcatccctggcagaaaaacccgccggtcacagtacaagtgaccggcgggttttttgttacatttaccacgtatcttaacgaaatatttatttcacaggctggttcgctttcacccttttaatattccgaatgataggatagaagcagaaggagggaaggaatgatgttacagttatttcagtccatgcgtaatttggaaaataaaattcaggactttgttaaggggcagataccggttcatccgcttctgtttggtctgggaatcttcttgggaatgccggttttgatccttttggccgtgtccgcggccgcatgtgcggtcattgtaccaattggcctgctgatgggatgggtgtgacatctttatacaatcttaataccacgtttaccccattaacgctattttaatgaaaggggtgatacaatctgtaagcaaaggaggaataaagaatggatattttaatcgctgtcataggcatctgcgttgtactgcttctcatttattatgtatatatcctgatgaagggggatgaacagcaatgaatccagtgatccagtatattctttatcttgtgattcttataatccttgcggttcctctggggacctatatctataagatcatggacggtgagcctatttttatctgcaaactattgggcccctgtgaaagagcagtatataaggtcttacatattcaaaaggaagagcagatgacctggaaaaaatatgcagtatgcattctgctgttttccggtataggcattctctttctttttggccttcagttgttgcagggccttctccctggaaatccccagaagcttccgggagtgaaatgggatctgtctctgaatacagccataagctttgtgactaatacaaactggcaggcatacagcggagaatcaactcttagctatctgtctcaggctcttggacttacggtacagaattttgtgtcagcggcaacgggaattgcggttttgtttgctttgatccggggctttcgtaaagtgaaggcagacgggctggggagcttttgggtggatcttacaagaattgtgctgtatcttctcattcctttgaatcttgtgctatctttgtgtctggtgggtggaggggtgatccagaacctgaagcctgctcagcgtgtttccctggttgaacctatagccgtggaccaggagggagcccttctggaaaatgcccagattgacagggatacaaataccgtcactgtggacggagtaagggtggaagatgcccagatcattacagaacaattcgttcccatgggccctgcggccagccagatcgccatcaaacagacgggaaccaacggtgggggttttatgggagtgaattccgcacatcccctggaaaatcccaatccctttaccaatctgctggaaatgctctctgtgctcctgcttcccgcagccctgtgctttacctttggccggggtataaaaaataagaagcagggtgtggtgattttcctggcaatgttcctctgccttgtggcagccctggccgctgtagctgtaaatgagcaccagggcacgcctcagctgtcccagaacggccttgtggacttgtcctggcaggggcaggcaggaggtaatatggagggcaaggagaccagattcggcattgcctcctcctccacatgggcggttttcacaacagccgcttccaatggctctgtgaactctatgcatgacagctatacaccccttgggggaatggtcaccatgcttttgatgcagctgggagaggtgatctttggcggtgtgggctgcggactttacggcatgctggcgtttgcggtgctggcagtgttcctggcaggtctcatggtgggcaggacaccagaatttttgggaaagaaaattgaaccctatgaaatgaaatggtcggttgtggtgtgtctggctacccctatgtccatattgataggcagcggcatggcagcggcgcttccacaggtaacagacagcctgaacaatagcggcgcccatggattttcggagctgctatatgcctattcctcagcaggcggtaataacggatcagcctttgcaggctttgacgccaataccgtgtttctgaatctgtctctgggagtggttatgctggccgcacgttttctgcccatgatcggtatacttgccattgggggaagtctgtccgggaaaaagaagatagctgtcactgcaggcacactttccaccacaaacggactgtttctatttcttttaatttttgtggtggtgctggtgggagcgctgagcttcttcccggcgctggcccttgggcctattgcggagtttttcagcagcattgcataggaggttgcgttatgtctatacaaacaggaaattcttttattcagaaaaatatggtgagccgggctgtgcgggattcttttgagaagctgaatcctaaaatacagatgaaaaatcccgtcatgcttttggtttatatttccgccatccttaccaccgttctgtggctggtgtccctgacaggaaccaaggatgcccccacgggttataccctggcggttgcagtgatcctttggttaacggttctatttgccaattttgcagaggccattgcccagggaagaggaaaagcccaggcagattccctcagagcctccaaaaaggacgtgaatgcctttaagatcccctccctggcagaaaaggaccggtttactgtggttccttctgcaagcctgaaaaagggggatctggtgcttgtacgggcaggggagcagattcctgcggacggggaggtcctggacggggcagcctctgtggatgaaagtgccattaccggggaatctgcccctgtcatccgggagagcggcggagaccgaagctctgtcacagggggaaccagggttttgtctgactggatcgtggtgggagttaccagtgaagcgggagaaagctttctggataagatgatcgccatggtggagggggcttcacggaagaaaacacccaatgagatcgccctgcagatttttttggtggccctttcgatcatctttattttagtaaccctgtccctgtatacctattccacattttctgcaaaacaggcaggtattgcgaatcccacctctgtgacaaccctgaccgccctgctggtgtgcctggcgcccaccaccattggagccctgctgtctgccatcgggatcgcgggcatgagcaggctgaatgagtcaaatgttcttgcaatgagcgggcgggccattgaggccgccggggatgtggatattcttatgctggataagactggcaccatcaccctgggaaaccgtcaagccagccagtttatccctgtgcacggggtaagtgaaagagagctggcagatgcggcccagctttcctccctggcggacgaaactcctgagggccgcagcgtggtggtcctggccaaggaaaagttcgggatccggggaaggcatctgtcagacagcagccgcacctttatccccttctcagctaagacacgcatgagcggcgtggatgtggacggtgttgagatacgcaagggagccgcagaggccatagaagcctacgtcacccaggccgggggcagctattcttcggaatgtgaggagattgtaagagagattgcctcttcgggagggactccgctggtggtagccaaagatcataaggtcctgggggtcatttatctgaaggatattattaagcagggcgttaaggagaaatttgcagatcttcgcaaaatgggcattaagaccattatgatcactggggataaccctttgacagcagccgccattgccgcagaggccggggtggatgatttcctggcagaggccacgccggaagggaaactgaagctgatccgggatttccagagcaagggccatctggtggctatgaccggtgacggaaccaacgatgcgccggctcttgcccaggcggatgtggccgttgccatgaacagcggcactcaggcagccaaggaggcagggaatatggtggatctggactcctcccccacaaagcttattgacattgtgcgtattggcaagcagcttttgatgacaaggggaagtctcactaccttttccattgccaatgacgtggcaaagtatttcgccatcatcccggctttgttcatgggtctgtatcctggtctgtccgcgctgaatataatgggacttcactctcctgaaagtgcggttctgtcagcagttatctacaatgcactgattatcatcgcattggtgcccctggcccttaagggggtgaagtaccgggagcttccggcaggcaggctgcttggaaggaatctgctgatctatggcctgggaggtctggcagcgccctttatttttattaagctcattgatctgctgcttgtcttatttggattggtgtaaggagggtgtattatgaaaataatgaaaacaattctgcccagggcagcggctgcttttttgatctttaccctgctgtgcgggggagtctatacagggattgtcacaggacttgcccagcttctttttcctgaaaaggcaaatggcagtatcctggagattgatggaaagaaatacggcagcgggcttgtgggacagcaatttacccaagaggggcatctgtggggaagaattatgaacctggatgtgagcacgtacaaggatgaaaagggcaggcccttaatgtatgcagtgccctctaacctaagcccggccagccaggaatatgaagcactggtccatgagagggtggaaaaattaagagcggcagatcctcagatgaaagaggcgccggttccggttgagctggtcacctgctccggaagcggcctggacccggatatttctcccgctgccgcagagtatcaggttggcaggatcgcccgggcacggggaatttcccaggatgaggtgagagagattattaagaaatgtacaacacagagatttctgggagttttcggtgagccttgtgtaaacgtgctgaaggtaaacttaatgctggacggaattctcaagtagggatatgatgaagtggtaaattatgctgaccaggggatacccatccgggtttacctttgtatagacaggaggggattacttggagaaagtcagaagcagcccagaggagcttctgcgccagctccgccaggaggaggaaaaggccggtaggggccatttgaaaatatttttcggctatgcggctggagtgggaaaaacctatgccatgctcaaggcagcccacggggccaggcgcaggggcgtggacgtggtggttggttatgtggagccccatgccaggccgcacaccgcccagcttcagcaggggcttgagattcttcctgttagaaccgttaagtatgcagggctcaccctccgggaatttgacctggacggggcgatcaaaagaaaacctcagctcatcctggtggatgagctggcccatacaaatgcagagggcagcaggcatttgaagcggtatcaggatattaacgagctgctggcaaacggtattgacgtatatacaaccgtgaacgtacagcatttggaaagcctgaatgatcttgtggcatccatcacagggattacggtaaaagaacggatccctgactttgtatttgacaacgcagatcaggtgaagctggtggatattgagcccaaggagcttatggaacgtctcagtgagggcaaggtctacgaaaaggagcaggcccgcagggctatggggaacttcttcacagaacccaaccttgtggcccttagggagatcgccctgcgccggtgtgcggaccgggtgaacaacatggcagagctggcaggaggaaaggccaatacaaggtttacagatgagcatattctggtctgcctgtctgcctcgccctccaatgggaagatcatccgcacggcagccaggatggccagggcgtttaaaggaaattttacggctctgtttgtggaaacgccggattatgcctatgtgaaggaagagaacaaggcccgcctcagggaaaacatccatctggcacagcagcttggggccaccattgagacagtatatggagaagacattgccttccagattgctgagtttgcccgtctgtccggggtttccaagatcgtgctgggaagaagcagtaccaggcggggcctgcttcccacacgtttggccctcacagagaagatcacacagctgtccccagacctggatatctatattattccagaccgtaagacaccctcgtatcaggcaaaggggcatgggcctcataaaatccgtctctctgccggggattttctgaaaagcttgttggtactgatggtttccactggcatcggtgttgttttcgaccgtttgggatttagtgaggcaaatattatcacggtgtatattttaggggttctggtgacggctgtgatcacctcccaaagagtattcagcatcataggctcggtgatcagcgttatgctgtttaatttcttttttacagagccccgctttaccttcaatgcctatgatgccggctatccggctaccttccttattatgcttacggcagcctttctcaccagctctctggcagaccggatcaagcgccaggcccgccaggcggcagagactgcctaccgcaccaagattttgtttgacaccaaccagcttctgggaaatgaaaatgacactcagggaattatttctgttacctgcagtcaattaaagaagctgctggacaaggatgttttgttctatggggtaaagggcagctccctggaggaacccctgctgttccctgtccgtgagggaaaggatatacaggagtatatcacagagaatgaaagagctgtggccgcctgggtttttcgaaataataagcatgcgggggcaaccaccaataccctgggagaatccaaatgtctgtacctttctgtgagagtaaaccaggaggtatacggagtggtgggcattgcggtggaacaggcccccttagatgcctttgaaaacagcatcatgctctccatactgggagagtgcgcccttgcattaaaaaatgaaaagaccacaaaggaacgggaggcggctgcccttatggccaaaaacgaacagctccgggccaatctgcttcgttccatctcccatgacctgcgcaccccgctcacctccatctcaggaaatgcaggcattttgctgtccagcgaagagagcatagacagggacaagcgcaggcagctttatgaggatatctatgacgattccctttggctcattaaccttgtggagaatctactctctgtcaccaggatcgaggatggaaccatgaagctgagactgaccacggagcttctagaggaggtgatcgcagaagctcttcaccacacagaccgaaggcgcagtgagcacaccatacaggtgaagtccgacggctcctttgtgcttgtgaaggtggatgccaggctgatcatgcaggtgatcatcaatctggtggacaatgccattaagtacacccccaaagggtcccagatcatcctggagacaaagcagaaggactccctggccattgtcacagtgagcgacaacgggggagggatttccgatgaatctaagaaacatgtgtttgatatgttttacactgcgggtacaaaggtggcagacagccggagaagccttggactggggcttgccctgtgcaaaagcattgtcaccgcccacgggggaacgatcacggtggcagataaccggccccagggcacggtgtttgcctttacactgcctgcaaaggaggtaacgcttcatgaataaaccattgattttggtggtggaggacgattccgccgtgcgcaatcttatcaccaccaccctggaaactcataattaccgctatcagtctgcttccacaggggaaggtgccatcttgaaggctgtttcccacaatccacaggtggtgctgctggacctgggcctgccagatatggacggcattgagatcatcagaaaaatccgttcctgggccaagactcccatcattgtcatcagcgccagaagcgaggacacagataagatcgaggccctggacgcaggggcggatgactaccttacaaagcctttttctgtggaagagctgctggcacggctgcgggtcaccttccgcaggctgaatgattcccagacaggagagggaagtcagtcctcggattttattaacggagatctgaggattgattatgccgcaggctgtgtgttcatgagaggggaagagctgcatttgacccccattgaatataagcttctgtgcctgctgtccagaaataccgggaaggttctgacccacacctttatcaccaaggagatctggggcagcgcatgggacaatgacgttgcgtccctgcgggtatttatggccaccctgcggaaaaaaatagaggccaatccctcagaacccaaatatatccagacccacgtgggagtgggataccggatgctgaaggtataagaagttaaaaaacaagccaaaggaagggtcaatttaaaagtttttgtggaataaaatttgggaaaagcacgaaaaacctgtccttcacataaactataaagaaatcccctttgaggtgacgttttgaagacatttcaaaagcccctgacgtcggacgaggaaagacagtatcttcaaaaataccagaggggcgacttggaagcgaaaaatgtattgattgaacgaaatcttcgcctggtcgcacatgtggtaaagaaataccagggtacgggcgaggatttggacgatttgatctccataggaaccatcggcctcattaaagccgttaccacctttgacgcaaacaaggccagccggctgtccacctatgctgcccggtgtatagaaaatgaaattctcatgcacatgcgttccaaaaagaagcattcccgggaggtgagtctctatgaacccatcgggacggacaaagaagggaatgagatcaatcttctggatattattgaaagtccgccggtggacgtggtctctgattatgccaccaagctggagattcaaaaaatgcttacacttatggaaaaacttccgcccaaggagctgcagatcatccggctgcgctacggcctgtccggggaagaggaactgacccagcgggaaattgctaagcgtctgtccatcagccgctcctatgtgtcccgcattgagaaaaatgcccttttaaggctgaaggccttgttttacaccggagaacctgagaatagtcaaaagaaatagataatgaaaaataccggcacagtgcaggcggggaaactctgcagtgtgccggtatttttcattggattttaaggaaaggttcctgaagaggatccaggattttttgtggtgcgcaggggcctggtgtggaagcgaaagcagtttttgcctttttgctttgcctggtacatggcctgatcggctgcttcgtagagcttctcataggtgttaccgtcataggggcagcaggaaatgccaatgcttgtggaaagaggcagattattttccagggaatatcggtttagcagctcctggaaacgccgtgcttttttggcggctacagaagaatccggacggcaggccatgaaaacaaccagctcgtctccgccgatccttcccagaatatcctctgtgcggaagagactgcgcaggacagaggccaggaactgaagaacctggtcacccttgttgtgaccgaactgatcattgatctgtttgaaattatccacgtcgatcatgaagaaaaagcccgtctgtcccgtcaccaggatgttcccgatttttttctctgtggtgcgcttgttatagagggctgtgaggccgtccatttccgacagctcaattaaataatcttcatgctgcttctgatggtcaatatctgtgatctttcctatgatggaagcaggaactccatttttaaataagcaccggtactggacaaggcaccagaaatactgttgcttggcaggatggagcaggcgcacacgaaggtctgtctgctcactgcctgagggagctttcagggcccgctgtatctgctcatagtctcctgcatagatgaatttggaggacaagtttttgcggaagccatggtggatcagggtgggggtccggaacagcttcttggcattgggggtaaattgcatggtatctgtgacacagttatagtcaaagagcactgtgtcagaaaattgttccaggatcaggtagcggcgctcttctgcagacacctggttctcaagcctgcgcagaaggaggaacagcacaaggcagcataggagtacagcggctaccaggactgtgatcgttattacggtattacgaataatggaagaagagtgttgcacagcattgccggcccgaaggatcactgccagatgccagctgttatactccaggtccgtgatggataaataaacaggtgttttttggctgtatcccaaaaagaagctctcggcaaccggtgtatgggattccagtgcttcttttaaggctttctcccctgaggtggacagactcaggggtgattcttcttccaggtaggtgtacagactgtcccattggtccgtttggtccgcccgcacagggatgatctttcccgagcagtccacgagaaagctggagagaatctcttcgtggatggaggaagaggaatggaccagggtttctgcatttaatatggcccgcaggccgccgataaatttgtctccctggaataccggaacacctaaggcaaagcaataaatgtcccccatgcggctggaaaaggtaatgtcagatacaacggtctctccctgcatgagccggtcaatgatctgggaatcctcttctctggcggagccgtcggcgattctttgctggaattcttgggcagtggtgtataaaaaacgggagccaggattgttttcattcaaggccttcaggtacgcatcgataaattctgtgtctgcttgttgtccgatgaggacggcgaaggcgctgagggtattgctggtcttttccagaacatcccgggcttctgccttttcgttgagtacataggcatttaaggtttcttccgtcatggaggcgaactcatcctgtgtgcttctgcggaaaaaggaaaaagcggcaaaaatgcacactgccagaaacaccgtacacagccccaggatcataacatatggggatacccggcggttcttagggatttctgtattttcttcccgttcttgggaaggattctgggacggggcctcctggatgggagaaccggtgctgggcagaggatagcagccgttcagagattcaaaggcggcaaaaaattcatctggaggcacagcctgagaaaaataatagccctgggccatctgacagcccagattcataagccgggtacactgctcctgagtctctacaccttcacacaggacccttgtgtgaaggcgctccccaatgttgatgagattgggcaccagggcgtcattgcgggctttgtatacggggttatcctctaagaagactttatctaatttcaaagcatcaaaggtgagctcctgccagatattaattcccgcatagccagacccgaaatcgtcaatggatacctgatagccatagctgcgaagctggtcaatgagctttttggctccggtaaattcgtttaggaaaatggtctcagtcagctccatttccagaaggctgcagggaattccataatcagtgatcatcttatgaagttcatatgcagtgtcaggattctggatgtgaagacgggacaggttgatggaaatgggcaccacgggaagtccctgcttcagccgctgggacaaaaattcacacacctgccggcagatgagaaaatccaactggatgacagcgccgttggcctcaaatatgggaaggaaggtatctggataaataatggtattatccggattctggcgcctggcaagggcctctgcccccacgatctctccagttgataagtccactttgggctggagaaaaaagcagaaccgctccgtccgcagggctgtgaccagttctttctccagctggtacttgtccttaagctcattcagggtagagcggtcgaacaataccgggttcacagagccctgcgccttggcttcttttctggcaagattggcgccgtcaacagcgtccagcaggttgtccttttcaatggtacatatcccgcaggcaagttttaaattgcaggagggatattgttcctgggaaaggcggagaaattcattggaatagctgtggtaaagagatagaatctgttcatcggttatgtggctgtccgcaattgaaagacataaaaatttgtcggagaaaatgtgttcgcaaagctttataccgggaatctgggacagaaatccccccaggctttccagcacatggtttccggcagcaattccgtaaaaacggttcaccagatgaaaatcggtaatatccaaactcaacaataagcagcgttttgattcaagatttgagcggaggatactggcagcatgatcaagaaaattttcgtaatgatccatgtggtattacccccaataaagtattttcatccaaaaaggaaattaattccaaagttaacaaatttagtataatacccagcacagggtttgtccatataaaaactggaaaaataaaaaatgtccgccatggaaagacggatacactagaattagagggatactcccaccaatgcctttttgcattgaagtgaggacttcctcaatgagatgaaatattccttgcaatggaaagcccagtagattacaatagaattggaggtaaaaatatggaaaaaacagaatttattgacgctctgtatcacattgtaaatacaacagagcagctgaagattgccactctgatcgaggagccggaggaaccggccctgtatgtggaacttatggatggttcacgatttcacattctggtaaccccaactactttgcatttctgaattcctttctaacaaaagattccctttaatatacaaaagataaaatagaaaaaatatagaaaatatagaaaatatagaaaatatagaaaaaaaggagtgttgaacaaatgttcagcagtgttttgtctgcggctattttaggcatggaggtattttccgtccaggtggaggctgatgtgagtgacgggctgccctcctttaccattgtgggctttgcctcctcccaggtgaaggaagcccaggagcgggtgcgaacagccctgcgcaacatgggaatctcccttcccccaaaacggatcaccatcaatctgtctcccaccaatatccgcaaagagggcgccggctttgatctgccagtggccgcagctatactctgcgccgtgggcaccctccctgcagccgtcctttgtgacgttatgatggccggggaggtgtctctcagtggcagagtaaaccgcatatccggcattcttcccatggtactccatgcaagggagctgggcttgaaagcctgtatcgtaccttgggaaaatcggcaggaggcatctctggtagaggacatgccaattgtgcctgtgaaggatgtgagggagctggtggatttctgccgggacccggcagggcttatgagccacgtcctttgggacgttgagccgttgctgagagaccctatggattatggtgtggattttgccgacatccatggccaggagccggtgaagcgggcagcagagattgcagtgagcggtttccacaaccttctgctcatcggccctccgggatccggaaaaaccatgatcgcccgcaggctgcctaccattctgccgcccctcacttttgaagaaagtctggagcttaccaagatctacagcattgccggccttctcacgccggagcagcccattcttaccgtgaggcccttccgttctccccatcatacagcctctccccaggcattggcaggaggaggccgcaatcccaagccgggtgaagtcaccctggcccatcgttctgtcctgtttctggacgaaatccctgaattttctaaaagagccctggagattctccgccagcccctggaggaccggcagattcagctttccagggtgcaggggacttttctgtttcctgccagttttctccttgcggcagccatgaatccatgtccctgcggctattatccggatatgaaccggtgtacctgctctgccggcagtgtccagcggtatctggagaaactaagccagcccattttggaccgtatcgacctgtgtgtggaggcaccggaggtttcctatgaacagatcacaggaggaggcaccggggagtcctctgagatcatacgcagaagggtggcccgggtccatgagattcaggcaatgcggtacaaaggtacggatatacagttcaactctgaactgcctcccggccagattgaggccttctgccaggtggaggaggaaggaaaggaacttttgcaaaaagcctttgccaggcttcatctaagcgccaggggctaccacaggatcctgaaggtggcccgtaccattgcggatatggaggaggcttcggtaatttccgccgcccatattggggaggcgcttacttaccgcaccctggataaaaaatattggaaataagaggagcacttttattatggaagaaactcagacaaagggcatacaatatattacaaagggagagaagggatatccccaaagactgctgcattttcccaatatgcccaaggaattatattatatgggaggcctgcctaaggatgagctgcccaccgtggggattgtgggagcacgcatgtgcagcgcctatggaaaaatgctggcttaccgctacgggaaattttacagctccctggggattcaggtgatcagcggcatggccctggggattgacggggaagcacacaagggagccttaagtgagggaacccccacctatgcagtgctgggatgcggcgtggacgtatgctatcccaggggaaaccgggaactatatgaaaacataaaaaagtccggggggctgatcagtgaatttctgccgggaactcctgcggcgggctggcattttcctgtgagaaaccggatcatcagcgccctgtcggatgtgcttctggtggtggaggccagggagaaaagcggctccctgatcacagtggactatgccctggagcagggaaagagtgtgtatgcagttccaggcagtgtcaatgaccagctcagcagaggctgtcacaagctcattgcccagggcgcgggcattgcctacagcccggaagtgcttttgaaggaatgggattttttgcccaagaagcccctgccgaaaacgaaaaaaaacaacttaggacttgcaacagaattggaattggtgtatagttgtctcgatttacgaccaaaaaacgtcacgtttttagtggaaaagaccggtttttcaccggctaagatcagaaatcttctgacagagctggtgctttacgatctggcagaagaaatcggaaaaaattactatgtgagaattcaatagaagaaattaggattcttcccatggtcgtattctatgaaattaccccaatgtggagtaaaacaaacaaaggtaaagaatgacaatacaggagaggtagaatggcaaaatatttggtaattgtggaatcacctgccaaggtgaagacaatcaaaaaattcctgggaagcagctacgaggtagaggcatccaacggccatgtacgagacctgccgaaaagccagatgggcattgatgtggaaaatgattttgaaccgaaatatatcaccatccggggaaagggagagctgctggcaaagctccgcaaatccgccaaaaaagcagataagatctatctggcgacggaccctgaccgggagggagaggcaatttcctggcacctgacaaaggcgttgaatgaagatttatccaaaatgcacagaatctcttttaatgagatcactaagaccgcggtaaaatcttccattaaacaggccaggcctctggacatgaatctggtaaacgcccagcagacacgaagagttctggaccgtctggtaggctacaccatcagccccatcttgtgggcaaaggtaaaaagaggtttaagcgccggccgcgttcagtctgtggccctgcgcattatcggagaccgggaggaggagatcaactcctttattcctgaagagtactggagcctggaaggggacttcctggtagacggagagagaaaacctctcactgccaagttttacggaacggataaaaaactgaatattaccaacaagcaggaaatggatgaaatcctcaaagccctggagggtgccgaatttcaggtatctgaggtaaagaagggtgagaggacgaaaaatgcccctctgcctttcaccaccagtaccctccagcaggaggccgccaagacgctgaatttttcaacccagaagaccatgcgtctggcccagcagctctatgagggcattgatattaagggaaacggtacggtaggtatcatcacctatctgagaaccgattctacccgtatttccgatgaggcagaagctgcggctaagacctacattgagaaggaatacggagagaagtatgccgccgtcaccaccaagaacgggaaaaagacccagaatgtacaggatgcccatgaggccatccgccccacagatatcaccaggactcccattcatttaaaggagtccctttccagagatcagtaccgtctgtatcagctcatctggaagcgttttaccgcaagccggatggctgcagccaagtatgagaccacctctgtgaagatcaatggcgggggatatacctttacggtggctgcctccaagctgatcttcgatggttttatgtctgtatatatccaggaggaggatgagaagaagaccaacaatcttctgtctgtaagcctggagagcggaatgaagctgaagctgaaggaattccgtccggagcagcatttcacccagccgcccgcccactatacagaggcctcacttgttaaaaccctggaggagctgggcatcggccgtccaagtacgtatgcgcctaccatcaccaccattattgcccggcggtatgtggcaaaggagaataagaatctgtacatgaccgagctgggtgaggtggtcaataatattatgaagcaggcttttcccagcattgtggacgtgaattttacagccactatggaaggactgctggactgcattgcagagggaacggtacagtggaagactgtggtccgcaatttctacccagatctgaagcgggatgtggatgccgctgccctggagctggagaaggtggagatcgccgatgaagagacggatgtggtgtgtgaagcctgcggccgccatatggtgatcaaatatggcccccatggaagattcctggcctgtcctggttttccagactgccggaacacaaagccctattttgaaaaaatcggggttccctgtcccaaatgtggcaaggacgtggtgctgaagaagaccaaaaaaggcagaaaatattatggctgcgaggacaatccggaatgtgattttatgtcctggcagaagccgtccacagagaaatgtccccagtgcggcagttttcttgtggaaaagggaaacaagctggtgtgcagccaggagaattgtggatatgtaacagtaaaagagaaaaagtctcaagataattagaaaaaatagatgagatgttccgaattaaagaatatctcatctatttttatgacagatgcaaagtgaagcttggcagctcaggggaaaaaggagaaatttgctttaagtttcgtaagtgtgcggggaatttttaatttcacgtaaaaatgtgaaaacggaacagtgaaattttcataaaaagcctaaaatatgagataaatactaaaaaatgtcttgtaattttgcccataaacgtgtagtatgaagatataaaaatacaatatttttttagaaaaaaggaaaggaggagccaatgagtgttcagttgttagacaaaacaaggaaaatcaataagcttttacacaacagcagttccagcaaggtagtatttaatgatatttgccaggtattgatggagacacttagttccaatattctagttttaagtaagaagggaaaggttcttggtgtcagcttatgtcctggagtggaggagattaccgaattaattgaggataaagtaggtggttttgtggaccagctgctcaatgagagatttttaggtgttttgtctacgaaggaaaacgtgaatctgcagacgctaggctttgagcatgtggcccccaattatcaggggatcatcaaccccattgatattgcgggagagcgtctgggaacggtctttatgtatcgttttgacaagccctatgatattgaagatattattgtaagtgaatatggaacaactgtggtcggactggaaatgatgagggctgtacatgaagaaaacgcagaagaagaccggaagcagcaggttgtaaaatctgcatttaataccctgtcattttctgagctggaggcgatcatccacatttttgatgagctggagggggatgagggaatcctggtagccagcaagatcgcagaccgtgtaggcattacccgttctgtgatcgtaaatgccctgcgcaagtttgagagtgcaggtgtgatcgagtcccgttcttcaggtatgaagggcacctacatcaaggtattaaatgaagtgatcttcgatgagctggaagagatcaaggcccagagaaataaaaagcagtgataatacagcgggcaggtttctgaccgaagataggaaagataagaatcaggttttctgtaattagaaaaggctgttttgaggaacaatagtagcaaggtttctcaaaacagccttttgttcttaattccattaggaaagttctccgaacttttctatggaacaagcagcaattgttttaaaaagaggaaatttttctgcctgttctttttcaaaagaaaacataaaaataagaaaacaagagaaaatagaagaaaacatgagatatattaatttaaataactttaaacatggataagaagagttgcagaaaaccaatgaattcactaatataaggacagtaattagcactcgataaaaatgagtgctaacaaatagaaaaacagtaaaatcagaataaggaggaaatagatttatgaagttagtaccattaggcgacagagttgtattaaaacagttagaagcagaagagaagacaaaatccggtatcgtgctgccaggccaggcacaggagaaaccacagcaggctgaggtgcttgcagtaggaccaggtggagtggttgacggcaaagaagtgaaaatggaagtggctgtgggcgatcaggtgatctattccaaatacgcaggaacagaagtaaagatcgacggagaagaatacattattgtaaaacagggagatattctggctgtagtgaaataatttcctgtaggcttattgtttgacttttaaatatattaccttaaaaatatggaggatgaccaattatggcaaaagaaattaaatatggtgcagaagcaagagctgcccttgagaaaggtgttaacgagttagcagatactgtccgtgtgaccttaggaccgaaaggacgcaatgtggttctggataaaccctttggcgctcccctgatcaccaatgacggtgtgaccattgcaaaagaaattgaactggcagacggttttgaaaatatgggtgcacagctgatcaaggaagttgcttccaagaccaacgatgtagctggtgacggtaccaccacagcaaccgtgctggcacagtccatggttcaggaaggaatgaagaacctggcagcaggcgccaaccccattattctgagaaaaggaatgaagaaggcaacggatgttgctgttgaagccatcacaaaaatgagcaaaaaagtaagcggcaggaaacagatcgccaatgttgctgccatctctgcaggagatgacacagtgggcgagctggttgcagacgctatggagaaagtatccaacgatggtgtcatcacagtagaagaatccaagaccatgcagaccgagctggatctggtagaaggtatgcagtttgacagaggctatatttccgcttacatgtccacagacatggagaaaatggaagcgactctggaagatccctatatcctgatcacagacaaaaaaatcagcaacattcaggaagtacttcctcttctggagaaggtagtacagtccagtgccaagctgctgatcatcgctgaggacgtggaaggcgaagcgctcaccaccctcattgtaaataaattaagaggaaccttccaggtagttgcagtgaaagctcccggctacggcgagagaagaaaagaaatgctccaggatatcgctatccttacaggcggccaggtgatctccgatgatctgggactggatctgaaagaagcagatctgagccagttaggacgtgcaaaatctgtaaaggttgctaaggagagcactgtgatcgttgacggtctgggagacaagacagagatcgcaaaccgtgtagctcagatccgtgctcagattgaagagacaaaatctgactttgacagagaaaaattacaggaaagacttgccaaactggcaggcggcgtagcagtgatccgtgtaggtgccgcaactgagacagagatgaaggaagccaaacttcgtctggaggatgcactggcagcaaccagagcagccgttgaagaaggtatcatcgcaggcggcggttcggcatatatccatgctgcaaaggaagttgccaagatagcagcagagcttgaaggagatgagaagacaggcgccaacattattctgaaggctctggaatctcctctgtaccacattgcagcaaatgcaggactggaaggctctgtgatcatcaacaaggtgaaagagtctgaggtaggcatcggatttgacgccctcaatgagacttatgtggacatggtagaagaaggaatcctggatcctgcaaaggttaccagaagcgctctgcagaacgcaaccagcgttgcttctactctgctcaccactgaagcagttgtatccacaattaaagaagaagcacccgcagcaccggcaggaaacccgggaatgggaatgatgtaaaaaatttaaaacttggggaccagtgtcatagacgctggtcctattttatgctacaataatctgcagatggaaggtcataagctcatgggtttcatgcctgcatgaaaaaccatgaccttgggacccttcaatggaattacttaagaaagtgagggaaaaaatgagtgatttgtattcggaagttttggtgaagaaagaaaaaaccaccaaggatatgctgatcaagggcggccttattggattgactgtgatctttgtgatcggaggtctttttatccatcccctgctcctgatcctggccattgcctccggggtgggctgctatttcatcataccccggacagacctggaatatgagtatctctatgtgaacggggagatggatattgacatggtcatggccaaaacgaagagaaagcgggttaagagcattaatatggaacaggtggacttgatcgcccctgtaaattctcatcgcatggattaccacaacgggaataccaacctgagaaccctggattattcctccggaaatccggagcacaagcgctttgctatgatcaccaaggatgacaagggcacctgccggatcatcttcgagccagatcagcatttggcagaagctatgaaaaattcagctcccagcaaagtttttttggattgacactttttcagagatttgttaaactatggaacaataaagagacaaaagacatacaaagggaggaaaaataatgggtactatcattggtgaaggaattacttttgatgatgttctgctggtaccagcatattcagaggtgattcccaatcaggtagatgtcagcacatatctgactaaaacagtgaaattgaatattcctatgatgagcgcggggatggacacggtcacagagcaccgcatggccatcgctatggcacgtcagggaggaatcggcattatccacaaaaatatgtctatcgaagcacaggcagatgaagttgacaaggtaaaacgttctgagaatggagttatcacagacccatttttcttatcaccggagcatacattaaaggatgcaaatgatcttatgtcaaaattccgtatttccggtgtgcccatcacagaaggcaaaaagctggtaggtatcatcaccaaccgtgacctgaaattcgaagaagacttttccagaaagatcaaagagagcatgacctctgaaggcctgatcacagccaaggaaggggttactttggaggaggccaagaaaatcctggcagcttccagaaaagaaaaacttcccattgtagatgataatttcaatttaaagggcctgatcaccatcaaggatattgagaaacagatcaaatacccgctgtctgccaaggatgcacagggaagactgctgtgcggtgctgctgtaggcatcacttcaaatgttctggcaagagtggaggctttggtgaaagccagcgtggacgtgatcgttgtagattctgcccatggccattctgccaatattttaaaggcagtgagagagatcaaggccgcattcccggatgtacaggtggtggcaggaaacgtagccacaggagaggccaccagggatcttattgaagcaggggcggatgctgtgaaggtgggaattggaccaggctccatctgtaccacacgtgttgtggcaggcattggtgttccccagatcactgctgtgatgaactgctatgaggcagctaagccctttggcattcccattatcgcagacggcggcatcaagtattccggagacatgacaaaggccattgccgcaggggcaaatgtgtgtatgatgggatccatcttcgcaggctgtgacgagagcccgggaacctttgagctgtaccagggaagaaaatataaagtttacagaggcatgggctccattgctgccatggaaaacggctccaaggaccgttacttccaggaagatgccaagaagctggttccggaaggcgtggaaggccgtgtggcttataaaggccatgtggaggatacggtatatcagctcatcggaggcctgcgttctggtatgggatactgcggagctaaggatattgagaccttgaaggaaactggaaaattcgtaaagatttccgctgcagctctcaaggaatcccatcctcatgatatccatattacaaaagaggctccaaactacagccttgatgaataatttatccacagggagagagaagcagatcccagggtagattttgctcctctcaaaaaaatttagcttgaaaaatgggaaaagatattgtagtataaccgtagagactgcatgactggcggaagtaggagtacctacagggagtgcagtgtgacaaatgagccgaccgcctgggcagcctgggaacagactgtccaggcgtttttgcgtttcttaattataattgcaaagcgacaaagaagcaaaggagaaagggttatggaaatgatttcattggaaaaagaactgagagaaaattcctatccgggaagagggatcatcatcggcagaagtgctgacggaacaaaggctgttgcggcttattttatcatgggaagaagcgagaatagcagaaaccgcgtatttgtggaggatggtgagggaatccgtacccaggcatttgatccgtcaaagctcacagatccaagcctgatcatttatgcccctgtgcgggtgcttggaaacaaaaccatcgtcaccaacggagaccagaccgataccatctatgaagggatggacagacagctcacctttgaacagtccctgaggaccagagaatttgagccggatgcacccaactacacacctcgtatttccgggatcatgcatgtgaaggacggcacctacagctacgcgctgtccattttaaagagcagcaacggagatccaagagcatgtaaccgctatacctttgcctatgaaaatgcggtgccgggagagggtcattttattcacacctataagggagacggaaatccccttccaagctttgagggagaacccaagctgacggccatcccagatgatatggaggcatttgccacaatgctgtgggacagtctcaatgaggacaacaaggtgtctttgtttgtgagatacattgacatcgctacaggaaactatacaagcaagatcataaacaagaatcagtgacaaatggctgcccataaccaatgggtttatagaaaaagacaggagtgcagattatgaaagaattacagttaaaatatggatgtaacccaaaccagaagccttccaggatctatatgtcaaaggaagaggaacttcccatcaaggttctctgcgggaagccgggatatattaatttcctagacgccttcaatggctggcagttggtacgcgatctgaagaaagcaaccggcctgcctgcagccacgtcctttaagcatgtgtctcctgcaggagcggccatcggccttcctcttacggaaactcttgcaaagatttactgggtggatgatatggactggaagaatttttctcccattgcctgtgcctatgcaagagccaggggggcagaccggatgtcttccttcggagattttatttcactttctgatgtgtgtgacagggatacggcccttctcattaagagagaggtgtctgacggtgtcattgccccaggctacacccaggaggcccttgagatcttaaaacagaagaaaaaaggcaattataatgtgatcgagattgatgaggcctatgtgccagagcctctggagcacaaggaggtgtttggtgttaccttcgagcagggcagacaggagctggagatcaatgatgagctcatcgccaatgttgtcacagagaataaaaccctgtctgatgaggccaagagagatatgaaggtggcccttattactttgaaatatacgcagtcaaactctgtgtgttatgtaaaggacggacaggccatcggtgtgggagcaggacagcagtcccgggttcactgtacacgcctggcaggacagaaggcggacaactggttcctccgccagagccccaaggtgctgaatctgccttttaaggagaccattaccagggcagagagagacaatgccattgatgtatatatcggcgaggaatacatggatgtcctggcagacggcgcatgggagaacattttctcagagaagccttcggtgtttacaaaagaagagaaacgtgcctggctggatcagatgacgggagttacccttggctcggatgcgttcttccccttcagcgacaatattgaacgtgcccacaagagcggcgtggaatatattgcagagccgggaggctccgtgagagatgatgcggtaattgccacctgcaacaagtacaatatggtgatggcctttaccgggatccgcctgttccaccactaagaagtttctttggggtgattggaaagaaaacagcgagtgcattcctctgtaacagaggaaggtactcgctgttttgttgacggcggttttctgtgttgtctgcctgtcttatgctgcagtctctgcatcctgtacttgggcaggagtttcctggggaacctcctgtgtgtcaggagcattttccaggggatcagtctgggctgtgggggcagaggcttctggtgcatctaaaacgtcctgaggaatctggaaatcctctgcagaatcatagctgcttatggacagagaagccttggtctcacctatttcaatggcaaattccgggaattcctctccgctttgctggacaatctcttttacagcaggaaggatggaatccatatacttctgaagaaagtctgtgagatccatttcttcggcaatgagtttgtcactgtcatccagccacacgctgatttcaatgtcccctagatcagatagcagagcagaaaggtcaaagggtacaatgtcatcggggatctgatccagaaccccggtgtcctgaagctgttttttcattgcctcaccggtgaggatcccgtgaaatttagttgcggcagtaccgtttatggtatcctctcctaaatcttcaaaggtctctaaagtagttatactgctgctggaattcataatctctgtgagattcaggtcagttaccgtgctttttgaccaggttccctcctgaatttccccggattcatcaggggtgttcatacgcatataggtggtgaggccttcttcagagccctgggtataaaaatccatggtgaattggccgaagattcctgtatcaatggcaaagttaccttttaatttcatgggatccttaaagaatgtgaagtccccttcaaagccaaggggcatttcaatggcgccatcttccggaagaaccgtcaggctgatgtaagtgtccagactcatgtgggcatcatagttttgtacagtgtccagtgcagcttcggcatttttcacacgttcttccggagcagccgcggtgcaggggacagaggtgaagagcagagctccagtgagaagggcagctccgattgcggttttgtttttcatatagttcctcctgtcaggttaaaagtattggtgtcgcagatagattataccatgaggcccttcccgtggctactgtattatattaacattttagaaattttcgtgaatggaaagattgggggaagtgtgggtggaggattcattcacccatggggcggaatcttagatttttgttgaggttataaaaatttcagatttttgttgttcccaagatcgtggttttcggttacaatgagcatatggatacagtaagaactggtacgcaaggtaccccggaaaaaagatatttaataaatgaatcaaaatcctcaccggagcctgggaggacacaggaagctgtgcgttgtcatccaaagatcgtggagtttcaggtgaaaaaatctgctgtggcaggaaacaaaaagacatccgtctatgacagcagaaggcccctgccaggaatgaatgggaaacctgctttgtctggcagggaggagcctgcaccggagattgaattggatattcccatcattgacagatccgccatccctgtaaatcgcaaatcatctgctttaatcaccaaaaaaaccattgtggtatcaaggtcgaaattggatatccctcttatcaaaaagtccgtttcgtcaacagacagaaaaattttatcctttgatggggaaagaaccaaccggtccctgaattgccggtcagcggctttacacagggaagaaagggatggggccctgaggggaaaattggaggttcctgtcatggaaggcacaagccaggcagtgaaccacagaacggctgtccatgcgggccaaagtctggtggtacaggcggccacaaggggcactggaaaagccgcttcttccagaaggggaagatctgccccggcagggaagcgcaggacagcgggctcacaaagcagaggtccgcgaaatagaggctcacagggcagacgtccgccctccaggcccagaaagccggcgcgcacagccagagagcagcaggtgaggaacacaaagcgtattctggccttgatcgcattttttgctgtgctgatcatttgtcttttaatcatccgtatgggaggcggaggggaggagccgcacagctatatcaatgcccagtgtgaggcataccgtccggatgtggagcgcattgcggcagaatacgagatgggagaatacacggacttgatcttggctttgatgatgcaggagagctcgggaacaggcacagatgtgatgcagtcctcagagggaggctttaatacgcagtatccccaggagccgggagggatcacagaccctgaatactctatccggtgcggcatccaggagctgaagtatgccctggagcgggcaggctgtacaggaccaaaggacctggatgccatacgagtggctcttcaggcatacaatttcggtacagatgtgtatatgaattatctggaggagaatcagcaggatacctggtcacaggaaactgcagaggcatttgcccagtgggccagtgagggcaaagccagatcccagaccgatcctttccgggagacggcaggtccctgggattatggagatcagttttacccggagcatgtcctgcgttattatcccttggcacaggcacagtaaaaaatgaaaaaaatgtgaattgggccttgcataatccgaaaaatatgttacaatattgttacggaaatgtgaaggtgaagaaatgaacacatatgaggcgatttttagaagaaaatcagtaagaaaatataagatggagcccattgctcctgaggttttggaaggaatccgaaattgctatcaggagatcccgggtttgtttccggggatcgacacagagctcctgatacggaacaatctggaaaatacaaagaaaggtggtctttggacacccaaggcaccttactatttgtccctgtactccaaagagatggaaaagtatcagatgaacgcaggatgcattatgcagcagttgagtctgtatatgaccacccggggacttggaagctgttatttggggggaagctccctgaaaaaacagaagaaggaatccaacggaaagcgtctggtaatggagatggcctttggctgtccagccggtccccttaccagaagcaaggatcaggccaggcggatggagctgaaggagctgtgtgtgctgaaggaacccatgcggagctggatgcgccagatcctggatgcggccagaatggccccttccagcctgaactcccagccctggagatttcttgtgtcaaacggcaggattcatattttttccagaaaggacgagaacggcttccatggaaaattcacagaatttaacctgggagttatgctgggacacattatgacagctgcagaggagctttggctgggggtggatctgatccgcctggaggatatcagccagaaggaattccggcggtttgattacattctcagtgtgattctcaatgaatagggctgtgggtattgccaggcaggattgcttttgtgtcaatttttgaaaaaaacatgaaaaaaattaaaaaaagggtttgacaaacaggtaaaaatcatgtatagtatctattgtcttagggagagaaaaacttccggataatagaaatgcgatagtggcgtagttggtaacgcgcgaccttgccaaggtcgagaccgcgggttcgagccccgtctatcgctctgaaaaacctcttgagtgttcaagaggtttttttattacataggaaagttcactgaactttcctatgtaataaaaaccctccgggggatgcacacaatgtgcaaaggaaagcagctttgtgctacataaaaaatggaagaggtgagaaggtatggcagagatgtatcctatgaaggtgatcgcccatatggaaagtgattttcctgaaaagtttggtattcccaggcagagcggcctggtggacaccttgaagggcaggattgtttttgaaaaagagttccaaagccgggatgcagtgaaggggctggaggatttttcccatatctggcttttatgggcattttcagagaatgtgcgggaccgctggtcccccacggtgcgtccgccccgtctgggagggaataccagagtgggagtctttgcctcccgctcacctttccgccccaatcccatagggctctcctgtgtgaagctggaccgggtggagatttcccagaaagagggaccggttctgtgggtgtctggagttgatctgatggacaggacaccgatttttgacatcaaaccttatctgccccatgtggacagccatccggctgcttctggaggatttggggataaatgtaaggattatggccttttggtggagtttcccaaggagctgctggaacagatccctttggagaagcaggaggcgctgaagggggtgctgtcccaggatcctagaccctcctaccaaaacgatcccaccaggatatacggtatgagcttcgggggctttgagatccgcttccaggttggggacggagttttgaaggtgcgggaagtaaagaacatgcaggggaggaagaaatagagggatgataagagaagtatctctggaagagatttccgatggaagattatatggaagtaatgatatggtgaaggcggactgtggggactgtaagggctgctcctcctgctgtcaggggatgggagagtccattattctggaccctttggatgtgtaccggctgcaggtgaatctgggctgccagccccaggagctgttcattcataagctgaatctgtctgtcattgatggaaatatccttcctactatgaaaatggagggcagccaggagcggtgtgtgtttttaagccaggagggcagatgcaccatccatggattccgtcctggcgtgtgccggctgtttcccctgggaagattctatgaaaacgggggatttcaatattttcttcagatccacgagtgtaagaaccccagccggacaaaggtgaaggtgcgcaaatggatcgatgtgccggatgtgaagtcctatgagagatttgtctgtgactggcactattttctcaaggatgtgcaggccattttagaacagtccaaggatgaacagcttgtgaaaaacctgaatctgtatgttctgaaccgcttttatatgaagccctatgagcaggagagggatttctatgaacagttttatgagcggctgggagaggcgcgggagctgatcgcccttggcctgtaagacggtaggaaagaggacggcagaactatgtttttgattatcggtaatggaatctcctttgtggcagccttatttttggccgcaagctgctgtgtgaaggagcggcggaaggtgttttatctgcagcttgtgaactgtctgctccttgctgcggcctcctggtttttcggctcctatgcagggatcaccaccctgttggtgtctgcggcgcgaaattattttgtggccagggataaatatacaaagcctgtgatggttgtttttctggtgctggccgtggttttgggagcggtggtgaataaccggggacttttgggactgcttccggtggcggccacggttcagtatacggtgtgtacccaggtgatgaccagcgtgaaagggaccaagtacagtatagggatcaatgaatgcttgtgggtggtctattctctgctgatctgggatttctccacggcggcctgtgactttgcggttttgattgtggatgtgttttcactggtgcggctgtccagggaggaggcagggatgaaaaagaatataaaatctatgaaattatcataaaatattacgtttccatagaaatgtgtggtaaaataaaagtgataaacttattggaatatcccgtacgggagtgcccgggagggcatggcgtccaatgcgccgtataaagaattctacagggaggtttaattatgagaaaaagaagttttgttggagcactggtgtgcagcctgtgtctggcaatgacaaatcctcttccggccatggcagattcccagaaggtagttaccctgggggctgacctgaaccaggaacagaaggatagaatgttgaagtattttaatgtggataccaatgtagcccagattctgtatattaccaatgcagatgagagagagcacctgagttcctttgttcccattgagcagatcggaaccaggactgtgagctgtgcttatgtaaaacccaccatgtctggcggtatccgggtgcgcactgccaatctggattgggtgaccagcaatatgatcgccactaccttatccacctcaggcgtggtgaactgtgaagtggtggcagcttccccctttgtagtatctggcacaggggctctcacagggatcatgatggcctatgagtctgccagcggggagacattggactccaccaagaaggaactggcaacccaggagctggtggttaccggcaagctggctgaggatgtaggcagaaatgatgccaccaccattatcaatgaagccaagatggagatcatccagggaaatgtccaggaagcggagcagattcagaatattgtggtgaatattatccagcagaataactatcaggtgagtgacaatcagctcagcgagatcaccagccttcttgaggaaattgcacagcagcagtacgattatgaagagatgaaggaaaccctggagcgtgtggacaagaacgtgagcggcgctgcccaggaggagaccttccctgaggatgagcaggaccaggaaatccctgatgagaatctggaggaaataccagaagatccggaggatgatattctggaaagtctggatgaaagcgcactgggagaagatgtgatcacggattccactgaggagcctgcagtggacgatgagctgaacaacgatgatgagcagtgggatgaattcgactggtcagaggagggaaatggagagccggagcaggttccccaggatacaccggatgaaactacgcaggagccgggagcagatgtggaaacacctgacgtgaatatggaaacacctgatgtaaatgtagaaaatcctgatgtgaatgtggaaaatcccgatgaaattcccgagaatccggatgaatatgtggagaaccctgaagaaaccctgacacctgagggaggggaacagaatctggaagaggttcccgggcaggatggccagcaaagtgaggacttaagcccagacagcctggatgagacgaaacgggctctgtacgacaaggcagaacagttcgccaaggctgtataccagggagataccgctgctttggacagtctgatggcagcaggagagatggataccctggatgccgccgctgttccggtggatgaaaatacggcagcaaagcttaccgataaggttctcaaggcatacctggggattctctcccaggatgtacaaggctatgtgcctgaggatggtgacttgtaccttatgccagagatgaatcttcttgacaaagagatgaagaccattttcggtgtggatgccctggaaggagcggcgcaggcagaagagatcctggcggaagtgcctcaggagcagaaggatgctctgtacgctcagaccatgaaattcttcggaaagctttatggagaagatatggagcttatggagccaatggaataagaaaagcgatggatgaaatcaaagtggtacaataagaaaaacaggcagggcacagagggcacagagccggggctgtccctgtctcctgaaaaaacggtttgtggaaagctccacggaccgtttttttattacaaaggaaagctgctttgcagctgcacattggcgcacaaagctgccaagcctctcatgagtgagggaatggggagttgaagcgggcttgcccgccttgctccttacataggaaagtctctggtgtgggttttcttttaggcaatttgcgaaaaaaagcaggggcagttttggtagcatttttgaaaaaaacaacttgtatagactaccgtacaagttgtaacataaaagacaaggagggcgggttatggcaggagaaaacggaaagacaaaatacttttcattaatggaacaattgaaaaaggaaattctttccggggtgatcaagccgggagagaagcttccttccgagaatgagctggcagcagcctattccatcagccggcacacagtgcggaaggcgctgggcattctggagaatgaaggctttgtcacagcctcacacggcaagggcaccttctgttctgagcgtatgcgccacatgaagaattcccacaacattgcagtgataaccacctacatatccgattatatttttcccaggctcattcagggaatggaccgggtactgtccgcaaacggctacagcattatcttaaaaaatactggaaacagcaggcagatggaggcaaagtatctggaggagcttcttcagaaggacattgatgggctgatcattgaacccagtaaaagtcagctcttgtgcaaacatccaaacttgtatgcacaacttgaacagtttgccattccctatgtgttcattcagggaatctatgaggagatggaggacaagcctcacattctcatggatgactgcaagggtgggtatttggtcaccaagtacctcatatccctggggcacacagacattgtgggaattttcaaggccgatgacagccagggcagagagcggcacaagggttatgtgagagctctccaggaggcagggatcccctataatccagataaggtcatctggtttcacaccgaggaccgcaagacaaagccttccatggctgtgaagcggcttcaggagcagggacagtgtccccaggggattgtatgctacaacgaccagatcgccgtgcaggtgatggaaaccctgcaggaaatgggaaaacaggtccccggagatgtgtccgtcactggatatgacaattccgtgtatgcacaggcccagggaatcgggctgaccaccattgcccatccccaggaaaagctgggagaaatggcggcagagctgctgctggagaagatccggggagtggaggaaagagacagccgggtaaagcgtctcattgacccagagctggtgatccggaactcttgccggaaccgggcaggctaaagttctctgctctttggcccatggcgctgtatgcgcccgttcatgtatgtaatagtattcatgtatataataaaaggaggaacaatcaaatgaaaacaggaagagattacaaattttggttttgcacaggttctcaggacttatacggagatgaatgtctgagaaaggtggcagagcactcaaagattattgtggaggagctgaataaatccggcatccttccctttgaagtgatctggaaaccaaccatgatcaccaatgaagtgatcagaagaaccttcaacgaagccaacgcagaccaggactgtgcaggtgtgatcacctggatgcacaccttctcccctgcaaaatcctggatcttgggactgcaggaatacagaaagcctctgtgccatttacatacccagtttaacgaagagatcccctatgataccattgatatggactttatgaacgagaaccagtctgctcacggtgacagagagtacggccacattgtaagccgtatgggcattgagagaaaggtgatcgtgggacactgggcagacaaaaaggttcaggaaagactggcttcctggatgagaaccgccattggaattatggagagcagccatatccgtgtgtgccgtattgcagacaacatgagaaacgtggcagttactgagggtgacaaggtagaggctcagattaaatttggctgggagattgacgcttatccagtgaatgagatcgctgagtatgtggctgatgtaagtaagggcgacattgacgcactggtggaagaatattacagcaaatatgatattatccttgacggaagagatccggaggaattcaaaagacacgtggctgtacaggcaggtattgagatcggttttgagaaattcctggaggagaaaaactatcaggcgatcgtgactcatttcggtgacctgggctccctgcagcagcttcccggcctggccatccaaagactgatggagaaaggctatggcttcggcggcgagggtgactggaagaccgctgccatggtacgcctgatgaagatcatggctgccaatacgccaaacgcaaagggaacctccttcatggaagactatacctacaatctggttccgggcaaagaaggaatccttcaggctcatatgctggaggtatgcccctccatcgcagaaggccccattgccatgagagtgtgccctctgtccatgggtgacagagaggatccggcaagacttgtgtatacctccaagacaggccctgccatcgccacctctttggtagacttaggaaaccgtttccgtctgatcatcaacgatgtggactgcaagaaggtggaaaaaccaatgccacagcttcccgttggaactgcattctggacaccccagcctgacctggctacaggagcagaggcatggatcctggccggcggcgctcatcatacagcattttcctatgacctgaccgcagagcagatgggtgactgggcagcagccatgggcattgaggcagtttacattgacaaggatacaaagatccgtgactttaaacgggatctgaaattgggagaggtattttacagataatcgggtttttgcacaaagaaaagagaggtattgttatggaaagtattaagaaggctattttagagggcagaactgcacttggcattgaatttggatctaccaggatcaaggccgttttagttggggaaaacaatgagcccatcgcttccggggcccatgactgggaaaaccgtctggagaacggaatttggacctacagcctggaggatatctggacagggctgcaggacagctataccaagatggctgaggatgtaaaggaaaaatacggcattgtcctggagaccataggagccatcggcttcagcgccatgatgcatggatacatgccgtttaataaagaaggagagctgctggttcccttccgtacctggagaaacaatatcacaggggaggcttctgagaagctcaccaagctttttaactatcacattccccagagatggagcattgcccatctgtaccaggctattttaaataaggaagaccatgtgggagcggttgatttcatcaccaccctggagggatacattcactggcagcttacaggagaaaaggttctggggatcggagaaggctccgggatgttccccattgacattgataagaaaaattacaaccagaccatgatcgatcagtttaacgaactggtggcgccggaaaattattcctggaaactggagaacattcttccaaagttgcttctggcaggggagaatgcaggacagcttacggaaaaaggcgcaaagcttctggatgtgagcgggaacctgaaggctggaatccccttatgtcctccggagggggatgctggcacgggtatggtggcaaccaactctgtggccaaacgtacgggaaatgtatctgcaggtacctccgtatttgccatgatcgttctggaaaaggatctgaccaaggcttatgaggaaatcgacctggtgaccacccccacaggaaacctggtggccatggtgcattccaacaactgtacctctgacttaaatgcatgggtgaatattttcaaagagttctcccaggccatgggcatggaagtggatatgaacaagctctttggaacactctataacaaagctctggagggagacgcagactgcggcggcctgctgtcctactgctatttctccggtgagcacatcacgggctttgaagagggccgtccgctgttcgtgcgctcctctgactgcagattcaatctggccaattttatgaggacccatctgtacacagctcttggtgccctgaaggtaggcctggacattctgttcaaggaggaaggcgtggaaattgataagattctgggccacggcggtctgtttaagacaaaaggcgtgggacagaagatcatggcggcagccatgaacgtgccggtttccgttatggagacagcaggagaaggcggcgcctggggaattgcccttctggcttcttatatgaagaataaggaagcaggagagaccctggacgattacctgaacaagaaggttttcgcaggacaagaagctgtggagatggcgccggatgccaaagatgtggaaggctttgatacctttatccagcgctataagaaaggtcttatgatcgagaaggcggcagttgattctaaaatctggtaaaaagacacagggacaagaagttcaggggtcccaagcattgggactccatacaaagaaagaggcggatacatatgttagagcagttaaaaaaagaagtatatgaagcaaatatgcttcttcccaaatatggaatggttacatttacctggggaaatgtcagtgccatagaccgtgaaagcggactctttgtcatcaaacccagcggggtagagtatgatgagctgaagccagaggatatggtggtagtggatctggatggaaatgtagtggaaggcaagtaccgtccctcctctgacacagagacccacagaatcctttacaaggaattcccaaagatcgggggcgttgtacatacccattctccctgggctacaagctgggcccaggcaggaagagggatcccctgctacggaaccacccacgcagactatatgtacggagagattccctgcgtgagaaacctgacaaaggaagagattgatgaggcctatgagctgaataccggtatcctcattgcccgtcactttgaacaggaacacctggattatgaggcaatgcccgcagttctgtgcaaaaaccatggtccctttacctggggaactgatgcccacaatgcggtacacaacgcagtggtcctggaggaagtggcgaaaatggctgcccggtgcgagaccatcaatcctcaggtgaagcctgcaccccaggagcttcaggataaacattactacagaaaacatggcgccaacgcctactatggacagagcaaataacagatgataaagacaaaggttccgccgggagaacatccttggatggaaccttttttttcgttctttctgtatgaatgcagagaaaatggtgtggcactgtctgtggacggaaatttgaatccagcttttcaggattctttggggatggtataatagtttcgaaatgtgaagatgtacaagggtcctggaaagaccgtgaaatatggaggaagcagaacatgatcaaagtatttttagtggaagacgaacttatcatgcgcagggggataaagaataaaatcccctgggaggaagaaggcctggaatttgtgggagaggcagcggacggtgagctggcgtaccctatgattatgaaaacaaagccggatatccttatcacagatataaaaatgccctttatggacggcctggaattatcctccattgtgaaaaaggagcttcccaacacaaagattatcattctcagcggctatgatgaatttgactatgccaagcgggccattggaatcggtgtcactgattatcagctaaagcccatcacctcagaaaagcttttggaggcggtaaagcgggtggcggccatgatccgggaggagcggcagcagcagaagcttctggaagaatataaaaaagaaaaccaagagaacatggagctggagaaggccaaaattttctatgccttggtggaaaactccatgaccatgggagagatcctggagcggggcagacagcttgggctggattttactgcttcctattataccgtggtgcttttgaagattatgtcctcagggcaggagaatgtgtaccaggagcaccgggtggaggcagaggccaaggtggaggaatatctcaaggaacaggactctatttactattttaagcgctggggggaaggctggcttttgttggtgcgcagcgaggatgagaacgagctggaggatgtgctccaggtcctgaagaaatacgtatcccaggtggtccccaggggggacagcctgaagtactttggcggggtgggcaccacggtccagcggcttcgggatgtgcgccagtcctttctggaggccaaccgggtatttgccaatcgtttttttacggatatgaatcagatcatcacctccagggaagtgaagaatatggagctggtgagcagggagaaggaagacttaaaaagcattgatacctccaagattgaccggaagcttctggaaaacttccttaaggtgggtgatattgaggaggcttccggctttatggatgcctatttcgagagagtggggcttggaagctacaattcccttatgttccgccagtacctgatggtggatatgtacttctgcgtatccaagtttttggaggagctggggatcagccaggagcggctgcgggaaaggttcggggacgtggaggagatcaaggccagggttccctccaaggaaagtgtgtgccagtatttaaaggacctgttcaccgaggctctgcgccttcgggacagccagtccatggacaagtacagcggccccttggaggaggcaaagcgctatgcagaggagaacttcagcaacaatgagatttccctgaacacagtggcctcccacgtggggatcagccccagctatttcagcaccattttccgccaggagactgggcagacctttattgagtatctcacagggctgcgcatggagaaggccaaggagctgcttcggtgcaccagcaggaaaacttcagagatcgcctatgacataggctataaggattctcattatttcagttacatatttaagaagacgcagggatgtaccccaaaggattaccgggggagcagaagggagaatgctgattgaataggacaaagagaagcttttccctgaaaagaaggctggttatgctgtctgccattatcatcgtaccgctgctggttatggtgctgagcgtgctgatcattcttcagaatttcacggaatcctacggacagatcgtaagtaatattacagaggtaaataagtacaatatgaattttgagacggatatgaactatacggtgtaccgggtagtaattggctctgcatcccttgaggagttaaaaaagggagatattatggagggcaaggatcccagatatgctacgatcgtgaagaatccttatggaatgatccggtccgccagaagagattttacacaactggcacagaaagtgaccaatggagacagcgtgtttcccattcggggaattttatcttgtctgaacactttggaaaatgtgctgggtaaaattgaggagaatatggataagcctctgcaatattccaacaatatgcccatgtgggaaaatgatatacatggtgtcacctcattagtccaggattatattcaaaactacatttattatgagaccttgagcctggctcaattgaaggtaaagatcgacaaccagatggccagagtgatgatgagctgtatggggatattgggctgtattgtggtatttgtcatctttttttcaggaaggatcacaaggagtgtgacagaccccatcaatgccctgtgcgaggccaccaagcagatgggaaagggggattttacctcagaacagcagattgaatccgacgatgagatccagattctggtccagcggtttgacgagatgcgtgacaagatcggcaatctggtggaggatgtgaaaatcgagcagatgaagctgaaggatacagagctgaagctgcttcaggagcagatcaatccccattttttgtacaataccctggataccattgtgtggctggctgaggatggacaggccaaggaagtggtggagatgaccacctgcctgtcggaatttttccggacggtcttaagcggaggaagggattatatcaccatccgggaggaggagtctcatgtgcacagctatctgagcatccagcagttccggtatcaggatattctggaatatgagatcgatattgatgagaatctgtatgagtattctattttgaagctgaccctccagcctttggtggaaaatgccctctatcatggcattaagaacaaaaggggaatgggaaaaattatcatccggggcagggaagacggctcagacgtggtgtttgaggtcctggacaacggaattggcatgagccaggaggagctggtggctctgcgccggaaggtgaaggaaaaatccagctatggcaggaagggattcggactgatcaatgtggaggagaggatccgcatgaactatgggtaccgttatgggctggaatttgacagtgtgaaaggggagggtacaaaggtgactgtgcgcatacccaaaaaaaataccccttttttaaaagaaaacataccgatttctcagataaattaaaaattggaaaaatatttaactaaatccaagagattctccgtagctttttctgtagcttttgataaaataagctcatcagttgtgaggggtgagatactcacagcaaaaaaataaaggaggatctcaagaaatgaagaagaaggtattatcagtagcattatcagcagcaatggttgcatctatggcatctgcaatgacagttgcagcagcagacgacgatttgatcgtagtaggttacgcacaggttggagctgaatctgactggagaaccgctaacaccgaatcctttaagtccacatttacagaagaaaatggctacaaattaatttttgatgatgcacagcagaaacaggaaaaccagatcaaggcaatccgttccttcattcagcaggatgttgactacatcgttgttgctcctgtagtggaaactggctgggaaactgttctggaagaagcaaaggaagccggcatcccggttattctttctgacagacagatgaaagtttctgatgattctttatatgagtgctgggtaggcggcaacttcgttaaagaaggagagaccgctggtgactggctggcagattacctggagaaagcgggacgtgctgacgaagagatcaacatcgttaccattcagggaaccatcggagcatccgctcaggttggacgtaccgaaggctttggaaacaagctggcagagcatgacaactggaaaatgttagatatgcagtccggtgaatttacacaggcaaaaggccaggaagttatggaatccttcctgaaatcctatgatgacattgatgtagtagtttgcgagaatgacaacgaagcattcggtgccatcgacgctatcaaagctgctggcaagacctgcggaccagacggcgacatcatcatcttctcctttgacgctgtaaaggctgcttttgaagcaatgatcgctggcgatctgaatgcagcatttgagtgcaatcctcttcatggacctcgtgtagctgagatcatccagaagctggaagcaggcgaagaagttgaaaagattcagtatgtagacgaggcttacttcgataccactatggatctggaagctatcatggcagaacgtgcttattaatcagagcagttctaaggcttgatgaagtaactaaagaaatacaggtgcggagggtggaggccgtaagtcctccccccgcatctttttttgagccaaaatataggctgtgaggcagaaagagaggcgggaccatatggaatcaggtgtaatccttaccatgagaaatatctataagactttcccgggagtaaaggccctgcaggatgtggattttacactgcgaaaaggtgagattcatgctctgatgggagagaacggtgccgggaaatccacattgattaaggtgttgaccggtgtagaagaatttgaaacaggcgaaattcatattgacggaaaaagcggagcgatcatcaacaaatctccccaggaagcccagatgaacggtatcagcacagtgtaccaggaagtaaatctgtgtccaaacctatctgtggcagaaaatctttttattggcagagaacccagaaaaggcggtttcattgactggaagaccatgaacaaaaaagcccaggagcttttggagagcctggacattcacgtggatgtcacatccgcagtggagaattactccatcgctattcagcagatgcttgccattgcccgtgcggtggatatgtcagcaaaagtattgatcctagatgagcccacttcctccctggacgatggagaagtggagaaattgtttgttttaatgagacgattaaaagaccagggtgtgggaattatcttcgtcactcactttttggagcaggtatatgcagtctgcgaccgtatcacggttctcagaaacggcactctggttggagaatataaagtagaagagcttccgagagtacagctggtagccaagatgatgggcaaggatttcgatgaccttgcagccctgaaaaaagaaggggaagccaccaaggtgggggatgaaattgtcattgaggcaaaaggactggcccataagggaaccatccgtccctttgacctgaagatacataaaggcgaagtgatcggcctcacagggcttcttggctccggacgttccgagctggtacgggccatttacggagcagataagcccgatgagggagaattatttgtaaatggcaaaaagcttcaggtgaatgctcccattgatgctatgatgcatggaatggcttatcttcctgagaacagaaaagaagagggaatcattgcagatctgtctgtaagagagaatctgatcattgctcttcaggccaaaaggggcatgtttaagctgctgagcaaaaaggaacaggaagaatttacagacaaatacattaagcttctccagattaagactgcggacagagaaacacccatcaagcagctttccggcggtaaccagcagaaggtgatcctgggcagatggcttctcaccaacccggatttccttatcttggatgagcctacccgaggaattgatattggaacaaagacagaaatacagaagctggtcctgcagctggcggaagagggaatgagcgtagtatttatttcctcagaagtggaagagatgctgcgtacctgcagccgtatggcagtattaagagacggtgccaaggtaggggagcttgaggaatcagagctgaaccagtcttccatcatgaaagcaattgccggaggtgatcaataatggataaactgaagaaattaacaagttatcgtttgtttctgccgatcttgtgcctgatcctggtgcttttggtaaacctgatcaccactcctgacttttttgccatcagtatccgtgacggtatgctctatggctatatcattgatgtgatcaatcgtgccagcgagctggtgatcctggctgtaggcatgactcttatggttgctgcgtcaggcggaaccgatatttccgtaggtgccgtgatggctgtggcagcagctgttacctgcaacgttctggctgggggccagcagtccgtgactgagtacagcaatccttatatattaggtgttctggcaggtcttgtggtagcgttgatctgcggttgtttcaacggatttttggttgcaaagctgaagatccagccaatgatcgcaaccttgattttgttcaccgcaggccgtggaatcgcccagctggtgacaaaaggacagatcacctatgtgcgtgtggatcagtataagattttaggctccagcattaaagggcttcccctgccggttcctttctttatcgccattgcagtggtgatcctcacctctttgatcttaaggtatacggcaatgggaatgtacattcagtccgtgggtattaactcccgggcctcccgcctggtgggcctgaaatcctctatgatcatcttcctcacctatgtattcggcggtttgatggcaggtatcgcaggtctggtgggaagctcccgtatctactcagcggatgccaacaacatcggtttgaatatggagctggatgccatcctggcagttgccctgggcggaaactcccttggaggcggtaaattttcactgatgggttccgtgatcggcgcctacaccattcaggcactgacaaccaccctgtatgcaatgcatgtctcctctgatcaggttccggtctataaggccatcgtggttgtgatcatcgtgtccttacagtctccggagctgaagaaatggttcagcaaaagaaaaatgaataaaaaagcagtaagcggaagcggggtggcataagatgagcggttcaaaagcagtaaaagaaaaaagaaaattagacgggaactcctttttacttttgatcaccatcgtattgttcttcgtcatgtatattgcaggtgtgatcattttcaatgaacagggatttggaaaagtacagaactttttgaatttgtttatatccaatgcaggacttattgtcattgcggcgggcatgactgtggttatgatcacgggtggtattgatatctccgtgggatctgtggttgccctgacctgtatgctacttgcatggatgatggaaaataaaggtgtgggcgctgttccggcaaccattctggtgctgatcatgggcgttgtgtttggtctggcccagggctttttggtggcctatctgaagattcagccctttattgtaaccctggcggggatgttctttgccagaggcatgacagccgtgatctctaccgatatgatcagtatctccaacgaaaccttcctttcctgggcaaagtttaaaatttactttccctttggaggttacgtgaacagaaagggcgttatgatttacccatacatttatccaagtgtggtcattgccctggtagttcttgtgttggtatttgtaatgctgaagtttacaaaattcggacgttccatttacgcagtgggcggcaacgagcagtctgcactgcttatgggtctgaatgtgaaaaagacgaagctgaaagcctatgtgctcagcagtaccctgtgtggtctgggtggatttttgttctgcctgaacacctgcgccgggttcgtggagcaggcgaagggctttgagatggacgccattgcctcggctgttattggcggtactcttcttaccggcggtgtgggaaatgtattcggctccctgttcggtgttctgatcaaaggtaccattgaggcatttatcaccttccagggaaccttgtcctcctggtggaccagaattacgatcgcggcccttctttgcttctttattgtgctgcagagtatctttgcatccattaaggagaagaagaaacattaagagaacattttgttacttcctatataaaaatagaaatagcatcctaaactttggacggttgtgatatgcccactgtcaagtagacaggttaaatatctaaaataagtgcagatgaacgatcacacagacttgtgtggtcgtttttctatgcacaccatttttctttatatttctcaattctcaaaattctttaatagccagatggcagtaatgccccagccggtctaatcttcgggccatctgttctgaggtcatggtcttgccgccttcaatccactgaagctgggcttgtatggagcccgtaaacacataattatagacaaattccagatctgcgggatcatagtccgggaattccttttcccagatgtcttttacggtcttccacatccgctttctgatccgttctgtgaattggggcgctccgttaggtccggcgagaagcatcaagagatcccggtcttcaaaggttgcgttaaataacgcagagaggatattcagatcattgttcttagatgcatattttccaaaatcagggacacatctgctgatcatgtcatcctcaagctcttttaatacatcgttcggctctccatagtgcagataaaaagtagtacggttcagcccggcttcctcacacaattctttcacggttactttgctgattggctttttatggatgattttcaaaagtgcattttttaaggcggtttttgtgtattgaactctggtatctgtatttttcataagtattcccctttaaaaacaacaaatttttcatagtgtcgattatctgtcaaactacagaatctgcttattgaatcttaattacagtatagattataatagatcaaaagtcaacgcaatgtcgataaaatatatacgtgtttatcaaaacacacacagtcgaaaagggctgtgaacggtatggaaaaacagtgatggaacaggaggaaaaaagtgtatattaaacagttaaaaggtatgattaccggaaatcccggaaaactgccgtgtccggggaatgtgaagctcatccgcagatgtgccgccgaggggattgttcttttgaaaaatgacggtgttcttccccagaaaccgtccaggatcgcactgttcggcgctggagcaaaaggaacgatgtactgtggtactggcagcggctatgtatttacatcccatgtggttacggtggaggaaggcctaaaaaaggcgggcttcacctttgcgtccgctgactggctgaaacgctgtgcggatcatgaaaaggcagtgaacaaggcagataagacactgtcccggctggaccgcaaatggagcggagtgacaatccttgcccaggaaccggagattaccccggaggatatccaggccgcaaaggcagatacggcggtgtatgtgatccgccgaaacgcaggggagtgtaatgacagaaaagcagagaagggcgactattatctgacggaccgtgaggtacacaacctgacggccgtggcatccggctatgcccatacaatcgtggtcctgaacacctgcgtgatcgatatgaattttatacaggacatcaaaggcatcgatgctgtcctgtacatggggctgggcggcatggaaataggcaatgccctggcagatgtgataaccggaaaggtgaaccccagcggcaggctgacggataccattgcaaagcggtacgaggatttccctacggctgggagttttgcagaccagaatggtacagagctgcatccggtgtacaaggatggcatttatgtgggataccgttactttgacagcttcggcatagagccgttgtatcctttcggatatggtatgagctatacggactttgcaatggagacgattgccgcctctgccgattggcagaaaatcagcctgaccgtaaaggttacgaataccggaacctgtgcaggcagacaggtggtacagctctatgccagcgctccggcaggaaaaatggaaaagccgtatcaggagctgaaagcctatgcaaagacaagaaagctggctccgggcgagagtgagagcatagatcttacctttgtcacaggggaattggcaagctttgatacagacagaagtgcctgggtgatggaggcgggaaactatctgctgcgtctaggagagaacagccggaaaacggtggttactgccacgatcacactggatgcagaagcggtggtacgcacggtaacggactgcctggctttggatgaaccgctggaggaactttgtgcgccggtcagaaaagatgaagctgcacagggaatcttattgtccttaagcgctgctgactgcgttacggttgacaatgtgagcaagagtccaagaaccgtcaccacctatattccagaagggacgacgtactattctgcagtcaacagcaatccttataaatccgtaaactactgcgaagagaggatacatccagttcgcaactgtcccaacagcaccctgtatgatgtgaaggacgggaaggtgaccatggaagaatttgtggcaagcctgccggaagaagtattggtaaggatctgtaccggaacgctggaggagacaccttatgccgtagatgaccgtacaaagaaaaagctgaaaaagctgaacgcgcccagctcatcagggagtaccactgcccagtatgagaagagcctgggaattccagcagcgtccctctttgacggccctgccggaatgcatgccatcggctgtgcgtcaggggcatttccggtaggtatggtagtggcgcagacctgggatacaaagctgcaggagcagacaggaatggcatttgccaaagaaatggccgcattccatgtgacgatcgcacttgggccgggcatgaatattcaccgtgacccattgggaggacgaagctttgaatattattcggaagatcctttattaaccggcaagacagcggcattctttacaaaggggctgcagtcagatggaaaacacggagtgtctatcaagcattttgccgccaataatcaggagacgaagcgtgcgcaggcacaaaataccatcagcacaagggcactgcgggagatttatttgaaaggttttgagatctgtgtccgggaggctcagcccatgacagtcatgacctcttacaacggaatcaatggagtacatacttcttcacggagagatctgcttcaagacatcctgcggggtgaatggggattcaagggatttgttatgactgactggggaacaagaagcgataagatactggattttcaggcgggaaatgacatcattatgggaggctgcagagtagaaaaaattctggacgcaatggtgcataaggcgccgatcttcacggaagacggcacggtttccgagaaagtgatggcaaaattcggcgggatcgtgaagaccgtcctcactgactggggcagctttttcccggaagcggatggcaaggatatggttcagactacagttgctgcagataaaaagctccatgagcgtgtgggaaaggcagagaaagaaggtattgcacaagtaacatacaataccgatggctctaagacgatcacttaccggggaacagaacggggagcctatctggcaaagggcactctccaggagtgtgccatgcgcattttgacggtattgatgaattcctctgctatggaggatctgttggtaagacagggggtcggccggtggagaagatagaatttaaccacaactggagctgtaacggcagtcccgtgacactgccccatgacgcaatgataacagagacgcgcagcgcccatgcttctgacggaggacatggctatttcccaggcggtatctatacctataagaaaacgtttactgccccaaaggagtggaagaataaaaaagtcctgatagaattcgagggtgtgtacagaaactgtacagttaccctcaacaaaaaagagatcggctcccacagatacgggtacactacctttgcgctgccactggagaacttagagtttggcgcagagaacacaatcacagttactgcggataattcagaactgccaaactccagatggtataccggatccgggatttaccggccggtgtggatctatgtgggagaccaggaggggattgggtaccgggggataaaaataacgcccctgtctgtccatcctgccaaaatcagagtagaggtgaatgcggccattcaggcaacagtggaaatcttagatggagaagcagttgttgcaaaagcattcggaaatgatgtgcagattttgattccggatgcaaagctgtggagtgacagaaatccgcacctgtatacttgccaggtcacggcaggcagagagagtgcccaagagaaattcgggatccgtcagattaaatggagtccgaaaggactgttcattaatggagaggagacactgctgcggggcggatgcatccatcatgatcatgggatcctgggtgcagccacttacgatgaaagtgaatggcgcagggtgcgcatcatgaaagaggcgggcttcaatgccatccgaatggcgcacaatcctgcgtcccgggcattgctggaggcctgcgatttctacgggatgtatgtcatggatgagacctttgacatgtggtataaccgcaagacaaagtatgattacggcagggacttcgagagctgctggaaggaggatactggggagatggccctcagagattacaaccatcccagcgttatcatgtactccatcggcaacgaggtggcagagcctgtacaggacaggggggtggcagctgcgaaggaaatgatcgcactgcttcacagcatagaccagaccagacccgtcacctgcggtctgaacctgatgatcctaagccaggcggcaaagggaaaaggaatttatcaggatggaacccagacggtgggatccgagagcaaaaatcaaaaagatggcggtaatgccagcctggcctttaatatcatggcttccttcgtgggaacaagtatgaataaaggcggcaactccaaaaaggtggacaggcttgcctccccgattatagaggcgctggacatcacaggttataactatggttccggccggtatcccctggaagaaaaacagcatccggagcgtatcatctatggttctgagacatttccccaggatatctgcaaaaactgggaaatggtaaaaaagtatccctatttggccggcgattttatgtgggccggatgggattatctgggagaggcgggaattggctgctggagctacacaggcggtttgccgttcaaccgaccgtacccctggatccttggaggaagcggggtgattgacatcacaggcaggccggacggctcctgcagatacgcttctacggtctgggggcttaaggatgctccgtgtattgccgttaagccggtgaaccacccgggcgtacgtccaagcaagtcggtctggagagagacgaatgccatagaaagctggtcctaccgagggtgtgacggcaacaaggccgaagtggaggtctacagcagcgccgcatatgtggaggtactcttaaacgggaagtctttgggcaaaaagaagttgaaaaacttcaaagcaattttcaaaacaaaatatgcggcgggcaccttgacagccatcgcctacaatgggaaaggcagccaggaggcacaaagccagcttgtctctgccaccggacagctctccattgctgtccggcctgaggtggaaaatgccaggccaggagaagtggtctatatcccggtggagattgtgggagagaacggtgtgacggaaagtaatgcagaccggaaactgagtgtgagaacgaaggggggagagctgcttgcctttggatcagcgaatccctgcaccagggagcaataccataccggaacatttaccacgtactacggacgcgccctggccgtagtccgggtaaaggaagacacaaccataaccgttacagacggcagcataagcagcagcgcagtaatcaatgtacagtaatggatttgcaggaaaagaggtgtatttatggctaaagcaattctttggaatgacaattggatgttcacaaaagagagtgaacgaaagcctgttaccctgccccatacgtggaatgctaaggacgggcaggacgggggaaatgactattggcgcggaagctgtctgtatgaaaagcagtttgctatgccccaattaaccaggggagaacagctttggatcgaatttcggggcgctgggatgagcgcagaggttgtactaaatggtgagaggctggcacggcaccagggcggattcagtaccttccgtgtgaatctcacatcttcccttcaggaagaaaatatactccaggtaaccgtagacaatggcaggaaccagaccgtttatccgcagaatgcagattttaccttctatggcggcctatatagggatgtgtatctgctgactgtgccggagacacatttttcgctggatcatcatggggcgcccgggatccgtatcactcccagagtatcaaaggatctgaaaacagccgtcgtagagcttgaggctcaggttacagggaaagcggagtatgtcacgtttgaagcagcaggacagacagtcaaagctgccgtggctgacggcactgcacgcgcttctgtcactatagataatgtacatctatggaacggcacagaggacccctatctttatactgctgtggcaagactgccggaggatgaagtatccgtccggttcgggtgccgcacctttgaaatgaatggggaaagggggttccttctcaatggcagcccctaccgtctctgcggcgtggccaggcatcaggacagggaaggcataggcaatgcgctgactatgcgtgagcatcaggaggacatggacctgatcctggagatgggagcgaacacagtccggcttgcccattaccagcatgcacaggaattctacgacctctgtgatgagcatgggctggttgtgtgggcggagattccctatatttcagagcatatgcctggggccagggacaatactgtcagccaaatgacagagctgatccagcaaaactacaatcacccgtgtattgtgtgctgggggctttccaacgagattacagccgtaggaggcgtcagtgaagatctggttgaaaaccaccgtatcctcaacagcctgtgccaccggctggatgggacacggcctaccgcaatggcccatctggccatgcttgacccagaagatccactggtcactctgccggatatccgaagctacaacttgtattatggctggtatgtaggagagtgggagcagaatgacgaatggattgacaccttccatgaaaagcatcctgagacggtcataggattttctgaatatggtgcggacgccaatccgctctatcagaatggaaggccgcaaaagggggactggagcgaaccctatcaggcggcttaccatgagcatatgctgaaaatgtgggcggaacgcccctttatctgggcaatgcactgctggaatatgtttgactttggtgcagacggccgcaatgagggcggcaagccggggcagaatcagaagggactagtcacctttgacagaaaactaaagaaggatgcgttctacatctataaggcatatttgagcagggagcccttcgtccatgtgtgcggaagacggtatgcagaccgcacagaggaagagacagagatcaaggtctattccaaccaaaagacggtcacacttctcctggacgggaagacgtttgctgtacaggaggcagagaaggtctttacattccgggttcctatctcaggagaacacaccattacggctgtatcaggggagcttacggataccattaccatccgaaaagcagaaacacccaatccggactacataaaaccgggaaccgagattgtgaactggtttgatcaggacagccaaatcgtaaaagaaggcttcttttccatcaaggacagcatggaaacggtcaaagcaaatccagaagccgccagggtactggatgagatgcttgcccctttgcaggcaaagatggtggaattgtatggagatgttgcaaagaatgtatccatgccgccaaaaatgcaggcgatgatggaccgtatgagtgtggaaagcagcttaaagcaggcgggcggcctggtgtcggcagaattcgtgcgtaagctcaatgcagctttgaatcaagtgaaaaaagaaaattaaccaaaggaggcagcccctggccccttaaagtcatggggctgtgagaaaaaagcagggagaagattatgaatactatacagaaaaagagtaaagttcccgttggaaattatctggcatgggcgtcccgtcctatcgcactgggagcgatcacaattatcattggttatctcagcatctattgtactgacactctgggaatgaacccggccgttgtgggaacgattttaatggcaagcaagatcgtagacggggttaccgatctggtggcaggctaccttattgacaatacccatacaaaatggggcaaggcaaggccttacgaaatctgtattatctttgcctggatatctaccgttctcctgttctcagcttcatcagcatggagcaatacggttaaggtaatatgggtgttcgttatgtatacacttgtattttctattttcagcacattgctcaatgcagcggaagctccctacattatccgtgctttcggagataaggttgccattacaaagctgacttcttttagcggaatcttcgttacacttggcagtgccatcgtatccatctcttttccaatcgtcatgggaaatcttgcaacgtctgataaaggctggagcaaaatggttttcatctatgcggttccgctggttgtgattggcctgatgcgctttatcttcataaaggagaagcatggaaaggataccaaggaagagcacgtaagactaaaagatatgttcacaatgctgaaaaaaaataaatatgcatggtgccttgccggaatcagcggagttgtccagttcataccggggcttggcagtgccacctattactttacgtgggtggttggtgacattaaaaaatattcggcactgcaggcactttccatcgttgctctgctgtgtatgctggtgttccccatcattgtccggaagaaatctgcaaattacctgattcgtattggagcgatcatgggtatcattggctttgtgatcaatttctttgccggaaagaatctgatcgtactggccattgcaggtctgctcaccggcttggcagtacttccgggttcttatatgcgctccctgcttgttatggatgtggcacaatataaccgctggaacggacttccgggaatggaggctgccgccgctgcactctctaatttctgcagcaagatttttgccgcatttggctcctttatcttagggattatgctggtacagggtggctacgactatggcgcaaatgtagcggcacagccggaaagcgcactgatgatgattcggattttatacagcatcattccggcactggcaatggctcttatgctggtatgctgtatcatctttgggtctcttgacaagaagattcctcagattgaagcggatctggcggcaagaaacaagtagaaaaatataagccggctgctaatgttcaggcagaggaggggtgacatgataaaattttcggaaatttttcaggatggaatgattttacaaagagaaaaaacggtacggatcaaaggtaagagtgaaaggccgcagcagattgaggtacgcttaaacggaaaagtgctgcagacccggtttatcgaagcaggagaatttgaacttctgctccagccgcagccggcaatggaatcggcagagcttttattccgggaagaagatggtacagaaacggtttttcgggacgtggatttcggagaagtgtggattgcgggcggacagagcaatatggaaatgcccatgcgctatctgatagaatttgaagagatgaaagaacaggcagatgacagccatttccgctgctatacagtggcccggtggagctttgagggggaaaaggcagatgggttcaaggatgattctaagtggaaccgctggcttgcctggaaaccggataggatggaatcttttagtgcaacaggctcttattttgcacagaagcttcgggaagcactgcacgtgccggtagggatcgtatcctgtaattatggggggacgactgcatcggcctggatggaagaacgtctgcttcgggataatccacagctttcgatctattgccaagagtatgagcaaggccttaagggaatggacctggagcagtataaccagatggaatatgcggcacgcaaagggcaggcagaccctaaaatcacggaaattctggaaaccctgcgaaagaccgttttcacccaagagattggggaaaaaatgaggaaagccacaatggacagcgcagggataagaggtgtggtccccatcggcccgcatagtgagaaccgtccgggcggactctatgagaccatgctgaaaaaaattgtgggatatacctgtaaaggggtgatctggtatcagggcgaatcggatgataagaaggccgatatttatcacacattatttacagagctgatcgcctgctggagaagggactggaaagaggagctgccctttcttttcgtacagcttgctccttttggattctggatggccttaacaggggaatttttcccacaggtgcgtatggtacaggaacaggtcagcaagaccgtgccccatgtgtggatgacctccattatggatgccggggaaaggtatgatatccatccaaagaataagaaagcagtaggagagcgtcttgccctgcttgccagaggaaaggtgtatggagaagatatcttatgtgaaaacccggaggcggtcagtctgggaaaagaagaaggaaagctttggtgcacctttgagcatggtgaaggactgtatatcaagggagaaaaactgcaggcattggaagtaaaggcagggggaaatacagtggacaaatggactgcacaggtatcggggcattgcctgctcatatcatcggatgccattcatgaaaacgaggaaatagagctgcattttgcacagcaaggatattgtgaagtgaacttgtataacgaggcggggctgccggcaaagccatttgtgctaaacctggcgtaaatggtaattgccctgccctactgcgcaaaacaaacgcctgattgtaaggcctgttagcaagatgcagaagaagcggtggtgtatttgagcaacaatgcagaagaactgggcgtggatgcagggaagattgctgcggcaattgagacagagccgtcaaaataaaaaaactgaagctgtaacctatggcagaagtgccagaaggttagaaaagatgccagagctataatttttgtatagttctggtatttttattggataggaaacgttccggtgccccagccaccttcggatcaaagcaaatttattatcaatggggagtgtctgaaggctgacgtagtgaaattcacgttgccaggactgtccccatgtctttacttttactgatttattcgttataataaagctggtcattcagccataagaatacaggctgttcagttactgaaaattaaggtcaagtaacaaaaaagtatagttttaaaaaatgtcaggaggagataaaaaaatgcgagtcgatacggacgattttgcccgaccttgtagctgcgggagagaacaccacattgaggtaaaagaaattctcattgaacccggagcagtgaacaaattagaagagatgatgacagagggatttttgaaagaatatatttcccccttaattatctgcgataccaatacccgcgaagccacagaggagctcatggaggacatctacgaccggtgtcaggtgatcattctggatgcggaggaccttcatgccgacaatcagggagttgagattgtggagaagaacatggatgaggatattgatctgattctggcagtaggagccggaaccatccatgacctgagcaggtatgtggcttatacaaggagagtaccctttgtttctgttcccacagcggcaagtgtagatggattcgtgtcaacggtggcagctatgacctgggatggtatgaagaagaccatgcccgcggcagctcctgtctgcgtgatcgcagatacggacatttttgccagggcgcccaagcgtctcaatgcctccggagcctccgatttatttggaaaatatatttgtcttgcagattggaaaatcgctcatctgctcaccggggagtatctctgcccggaagtggtgcagatggaggaaaaagcattaaaggcagtgaaatcctgtatccggggcgtggcccagggagatgaggaggactgcgagcatttgatgtatgccctgatcctgtcaggactggccatgcagatggtgggaaattccaggcctgcctcctgtgcggagcaccatgtttcccatctgtgggagatggaggtcatcaatgaccacgtggacgctctccacggggaaaaggtttccatcggactgatcctggcggccagagagtataagagaatcgcaagagccatccgggcaggacgctgccaggtgaaagagtatgaaggactggaaatggagcttctgaaggatacctttggaaagaaagggcttttggaggcaactgtgaaggaaaatacaccggatcctcttctggaggtctctccccagagattgagagcctgccttgatgagatcgcggatatcattgatgatattcctgatgtggaggatttggaaaatctgctggaaaaaggcgggtgtgtaagggacgtaaggcagatcgggctgtctgaggagatcattcccatgacgctgaatctgtccccttatgtgcgcaaccgtctgagtcttatgagaatacgcaagatgcttgacatcagataggaggcagcggtgaggattggaatgggatatgacgtgcatcgtctcacgccagatcggaagttgatcctgggcggggtggagattccctgggagagagggcttctgggccactcagatgcagatgtgctgctccatgccattatggatgccctgctgggagccgccgctcttggagatatcggaaaacattttccagatacagatccggcctatgaggggatttccagcctggctttattacagcatgtggcacagcttcttaaggagaaggggtatgaggtggggaacattgacgccacagtcattgcccagaagccaaagctggctccttatatctctggcatgcgggaaaatatcgcacacacactggggattcgtgtggaacaaataaatattaaagccaccacagaagaaaagctgggttttacaggccgggaggaggggatttcctcccaggctgtgtgcctgctgatctagggtggaaaaagcctggggaattttcttcaggcttttaaagcttcaccagggttttaaaaaagccgggatttgggaaaaatattgacaaatcctacggatttacatagactatagacagacgtttttgggaaaaagaaatggaggaacccctatgaaaatatataatacgctgtccagacggaaagaggaatttgtgcctctggaagaaggaaaggtgaaaatgtatgtatgcggacctaccgtatacaattttatccatattggaaatgcacgtcctatgatcgtgtttgacactgtccgccgttatatggagtacaaaggttatgatgtgaattatgtatccaattttacagatgtggatgataaaattattgccaaagccattgaagaaggtgttacatctgacgaaatttccaaaagatacattgaagagtgcaagaaggatatggcaggcatgaatgtgcgccctgccaccacccatccgttggccacagaggagatcgatggaatgatccagatgatccagactctgatcgataagggttttgcttatccagtggcagacggcaccgtttatttccgggtgaagaaatttaaggagtacggcaaattgtctcacaagaatctggacgatcttcagtccggcttccgctctttgcaggtgtccggggaggaccagaaggaagatccactggatttcgtgctttggaagccgaaaaaggaaggggagccttattggaccgcaccttggtgcaacggccgtccgggctggcatattgagtgctctgtcatgagcaagaagtatctgggagaagagattgacatccatgcaggaggagaggacctgatcttcccccaccatgaaaatgaaattgcccagagcgaggcctgcaatggcagactttttgcaaaatattggatgcacaatgcctttttaaatattgataataagaaaatgtccaagtcactgggaaatttctttacggtgagggagatcgcccaggagtatgaccttcaggttctgcgctttttcatgctcaatgcccattacagaagtccattgaatttcagcagagatctgatggaggcctccaaaaacgctctggagcgtattaaaaactgtgtggagcatctcacagatctgcagactgggtccggcgccatgaaggaccaggagcaggcactttggcagcagtcagatgtttttgtggacaagtttgaagaggccatggatgatgattttaacactgcggacgctttggcagcagtgtttgaactggtgaaattctccaataccaatgtgagtgaggatagttccggagaattagcaggaaaactgaaagaacggatcgttcttctgtgtgatgtgctggggcttcttgtggagaagcaggaggacaatctggacaaagaggttgaagagctgatcgcaaaacgccaggaagccagaaaggctaaggattttgcagcggcagacaccattcgggaccagcttctggcaatggggattgtcctgaaggatacccgcgagggagtaaaatggaccagggtttaacatatttaaaagagctgttctgcctggaggaccaggatatccgcacctattctccgctgactctggcttatctgggagacgcagtgtatgaggtggtggtgcgcaccattctagtgaaaagaggaaactgccaggtgaacaagctccacaggcaggccagccagctggtgaaggcggccgcccagtcagagatcatggggcggctggagcctgtgctcacccaggaggagctgggggtgtaccgaagaggcagaaacgcccattcagccactatggcaaagcatgccaccatggcggattaccgcagagccacaggctttgaagcactgatcggttatttatacttaaaagaagaatttcccaggatgatggaactgatccatctgggattaggagaggaaggccagaatgagcgaacagattgagggccgcaatgcggtcatggaggcattccgttccggcagatgtgtggataagctgtatgtccttgacggatgccaggacggcccggtgcggagcattacccgggaggccaggaaacatgataccatcattaattatgtagaaaaggaaagactggaccagctcagtgagacaggggctcatcagggtgtgatcgcccaggtggctgcctatgaatatgccactgtggaagacttgctggaaaatgccaggaagaagggggagccgccttttttgtttctgctggacaatattgaggatccccataacttgggggccattatccggacggccaatttagcaggcgcccacggagtgatcattcccaagagaagagcggtaggcctcactgccacagtggcaaaaacctcagccggagctttaaattatacgccggttgctaaggtcactaacttggcaaagaccattgaggagttaaagcagcagggaatctggtttgtgtgcgcggatatgggcggagagtccatgtaccgtctgaatctgacaggccccattggtatggtcatcggcaatgagggggagggcgtcagccgcctggtgcgggagaaatgtgactatgtggcgtccatacccatgaaaggggacattgattccctcaatgcttctgtggctgcgggcgtgttggcctatgaaattgtaaggcagagattgcagggtaattgatatatgaatgaaaaatatgatggattttcagatgaggaattgatccaacggctccgggtgggggaaggagatattacagattatttggtaaaccgctataaggagctggtgagaaaaaaagccagagctatgtatttaatgggcggggagaccgatgatctgatacaggaggggatgctgggcctttttaaggccgtgcgggattatagtccggaaaaggcggcctccttccagacctttgccagaatctgtatcgaccgccaactgtacaatgccatctccaattccaacagacagaagcatcagcccttaaacacttatatatctttaaacggggagtctgaggacagtcatttcttaagcgggctgtgggtggaaaacccggagagcattgtcattgaccgggaaaatacaaaggctttggaggagcagatcgagaaggctttaagccccatggaaaaccaggtgctggattattatctgaagggctacggttatgtgcagatcgcggatatgctgggaaaaagtccaaagtccattgacaatgctcttcagcggatccgctcaaaaatccggcagtgtgtggaaaacgccggtccgaaaaaataagctgtaggttctcctttggttttgggaaaatgttttttcgccagcggaagatccattgagaaatttacagctgaaaaatttgctgaaaatctttttgagaaatttgcttgacaacccagggagtttttgctagaatatcaaattgtgagcggcacaattaagccgtaaacaggaatgctgctgtggctcagtcggtagagcgtcgccttggtaaggcggaggtcacgggtccgattcccgtcagcagctttttaaataaaaattaaatcatacagcatgctgctgtggctcagtcggtagagcgtcgccttggtaaggcggaggtcacgggtccgattcccgtcagcagctttctggaacactctcgttggagagtgttttcttttgtgaaaaaaagacctgaaaaaggcctataaatagaaggaggccagcaccttgcggcgggtgctggcgtatgaaaaagaaaatttgtaaaaggcttatcaccttttatgtaccctactatacaggtgaaatgtgataaatgtgtgataggaatttgaaaaaactgtgaaggattcctatgatttttacatgaaaaatctttaaaattcaagaaaattatgttatgataaaaattcaagagaaaccgaggagggaaaaccatggaaaacgaagctgtttccaaaaattttattgagaacattatagaaaaagaccttgcagaaggggtttacgacactgtacacactcgtttcccgccagagcccaatggatatctgcacattggacatgccaagtccatacttctcaattatggcctggctcagaaatataacggaaaattcaacatgcgttttgatgataccaatcccaccaaggaaaagaccgagtttgtggagtccatcaaggaggacattaaatggctgggggctgattgggaagaccgtcttttttttgcctctgattattttcagcaaatgtacgaggcagcagtaaagcttattcaaaagggcaaggcgtatgtgtgcgacctgactgcagaggagatccgccagtacaggggaaccctcactgagccggggaaagaaagtccctacagaaaccgttccgtggaggagaatctgcgtctgttccaggagatgaaggacggaaaatatgcagacggggaaaaggttcttcgagcgaaaatcgatatggcttctcccaatatgaatatgcgtgaccctgtcatttaccgggtggcacatatgactcaccacaataccggggatacctggtgtatttatcccatgtatgattttgcccatcccattgaggatgccatcgaaggaatcacccattctatctgtacactggaatttgaggaccacagaccgctctacgactgggttgtgagggaattggaatatccccatcctcccaagcagattgaatttgccaaattatatctcaccaatgtggttacaggaaaacgttatattaaaaagctggtggaggacggcattgtggatggctgggatgatcccagactggtgtccattgccgctttgagaagaagaggcttcaccccagaggcgatcaaaatgttcgtggacctgtgcggtgtgtctaaggccaacagttctgtggactatgctatgctggaatactgtatccgggaagatctgaagctgaagaaaccacgtctcatggcagtcctggatcccataaaactggtgatcgacaattatcctgagggagagacggaatatctggaggcccccaacaatatggagaatgaggctcttggaagcaggaccattcctttcggaaaagagctttacattgaacgggaagatttcatggtggagccccccaagaaatataaaaggatgtacccaggcaatgaggtgcgtctgatgaatgcttattttgtcacctgtactggatatgaagccgatgaggatggaactgtgcgtgtggtccacgggacctatgatccagctaccaaggggggcaatgctcctgatggaagaaaggtaaagggaaccattcactgggtggcagcccagcaggccaagccagtgaaggtgcgtctgtacgaaaatatcgtagacgaagagaaaggggtttacaacaaggaggacggaagtctgaatttaaatcccaattctctcacagaggttaccgcctatgtggaacctgcccttttggaggcaaagggctatgacagctatcagttcgtgagaaacggatttttctgtgcggacattcacgactccaaaccaggtgctcctgtgttcaacagaattgtatctctcaagagctccttcaagctcccaaaagcataaaacagcagctccggccggaagtttcccaaatgaaattccggccggatttttgtgttgaaacctttgataattcattggccttatggtaaaataggattgaatgaaaaaaaccataaagataaatttcaggagggttaaaatgaaaaaattaacagtagcaaaaaaagatgcctgtatggcctgcaaggcctgtgaggccgcctgttctgaggcattctacaaggaattccatgaagattattcctgcattcacatcagtgtgaaaaaagacggagtaactcctaagccagtagtatgtgtacagtgcggaaaatgtgcggaagcatgtcccgagggggctattacccagaatgccaagggtgtgtacaccatcaacaagaagaaatgtattggctgtggaaaatgtgtggaagcttgtcccttcggcgtaatggtgaaagcagaagataaggaatacgcaagcaaatgtatcgcctgcggaatttgtgctaaggcttgtccaatggaagtattggagattaaagaggcataaaaccggatccataggaatgccataaggcatagacccaagtgcgcagtaaacgggttataaaaattgtattacataggaaattcttatatacagaagataattatcagccggagcatggttttcaaacactgcttttcactggccgcaccctccccagcggaggaatgccggtccggtgtgaacagtggtttggaacaacgctccggttttctttcttgcaatatggttgcaaataaggcacataaaatttataatgaatgattctaaaaaggtgggaaatgcgatagcagagtatcatatggataagagagatattatttcgggaataccagatgccagggaattttatgataaaatatcggttgtgatcgtaacgctgaatgagaacgtgaaatctcatgaccgttttatcaatatgatgaacaccctgctttcaccggcaaaacctgttgaaaagaaaaaagaggagttaacctctgtatttcatatacagatggaaaatggttttggaaaggagttggagcttatgtgtaacctttcagggtatgtggaagaatgggcgatggagaagggaatagaaaagggaatagaaaagggaatagaaaaaggcagaaaagacggcagaagagatggaatttatgcagaaaaagagagaatcgttctccggatgttagagctggggtatccggaagaagagattattaagattgccaatatttcccccaagcagtttgagaatattacccaaagtttgacgaaaaaataggcgataacagatgaaatccctttaatgtccggagttgtacaaagatatgtgatgttctaagaacaaagcgggcaagcccgaagtaaaaaagagctgttccccacaattgtattctatgtggtaaaacagctctttttgtctccgccttaatagggagagaagtggtttatcttatttctcctcttgggaaggggtatcgcaggcttcctcatcttgttcaggctctgcttctgaagaatccttcgaaagttcctcgtcagtggcagcttcctcagccggctcctgatcagcttcttccatggcttcttcttgactttcttggaaatcgtcctcctgaacagtttcttctttgtcctgggcagtctcctgatccagcaggtcctcaagatcatccgcttccttttccagctcttcctccggaatctcaacagagtcctcttcccaatccttgaaatcttcggcgcagttttcagcaaagtcgtcaaattcctcttctagttcacagcgggaacctccgtgttttttcttcactgctacagcagcgatcgcccccacagcagcagcggccagggcacccaatcctacatatccccaatatttattacattttgccatagttgttgctcctttccaattaacatacgttttttctattgtaatacttttttgcacaaaagaaaagaggaagatgtttatgaaaagaggttgcggggagaaaaagaagagggtatactaatgccatgaaaaaaattatactagcatccgcatcgcccaggcgcagagagcttctggaaaaggcagggatcaccttcactgtctgtcccagcgatgtggaagaaaacataacaaaaaccaaacccagggatgtggtggaggagctgtctttcctaaaggcccgggcagtggctgagcagtccccccaggacgcggtcattatcggttcagataccatcgtggcctttgaagaccggattttaggcaagccaaaggataaggaggatgcggcggccacaatacaggtgcttcaggggaaaacacaccaggtatataccggagtcacggtgttttggaagggaccccaggggcgggagcacatgaccttttcggaaggtacccaggttactttttatcctatgacacccagagaaattcaggagtatgtggataccggagaacccatggacaaagcgggaagctatgggattcagggggcgtttgccatctatgtgaaggggatctgcggcgattataacaacgttgtgggacttcccgtggccagattgtttcaggagttgaagaacagaggaattgacttgagaggataaacaggaaatgataaaagcatgtattttagatttagacggtaccctggcagataccctggagtccatggcctatgtggccaacagccttttgaccgagtttggactagagcctcagccagttgaaaaatacaaatattactgcggagagggagcagatatgcttatgcgccgctgtctcacagatgcaggtgatgagaaactggtccattatgaggagggaagaaggagataccgggagattttcgcagtggaccccatgtacaaggtcactcattatcctggcatgccagagacattgaaccaactgaaaaagcagggggtaaagctggctgtgtgctccaacaagccacatctggcagctgtaaaggtaatccgaaacatgtttggagatttgtttgacgtggtcatcggccaaaaggatgatatccgccgcaagcctgatccggacggccccctgcgtgtggcagaattttttcaagtactcccgcaagagtgtatgtatgtgggagatactgcaacggacatgcagacaggcaaggctgcgggaatgtttaccgtgggcgctctgtggggctttcgcactagggaggagcttatagaaaaccatgcggacgctttggcggaatgtcctgaggatctactggatttctacgaggacagccaggatgattaagatgacagccagtgatctggaggagattttgtactagcacagataagagaaagagtttggaaaaatttatggagcagcgggggattaccccggatgaatgtgcggtatttggggatgaatataacaatgtggagatgcttcaggctgtaaaacacagttttgccatggaaagcttcaagcccagagtgaagaaggcgtccagttactgtgtgcggcaggtggatcccatcctgagacaaatattgctgaacaatggaaaaatggaggaggtgttaagatgaacgagtacagtgaagaatgcgtactgacgtttttgaaaaaacagtcacagctatttgatgagccggtggctgaaacttatgcagaggcagaggcattcctggaggactgcatggcagttgtggtggattctctggaagaagtccgggagtatttccaggacaacggagcagacgtggatggaatgtccatggaagagctggaggaagccagcgaagtattttcgctgcccaatggtcagtatctgattgtggagggctgaagtatggaaaaaacagttattattcaaaagcagagagaattttatagggcggggaaaacccgcccttatgcgtaccggatgaaaatgcttacccggcttggaagagctgtggacaagtatgaggcagagatcgtaaaggccctgtaccaggacttgagaaaatcctcctatgaagcctatctcacggagatcagccaggtgaaaagtgagctgtcctatgtgaaaaagcatctgcggtcctggatgagagcgcgcatggcagccccttccatggcccagctgccgggaagaggcgtggtgttgtcccagccatatggagtggttcttattatggccccctggaattatccctttcttttgaacatggatccgctcatagatgccataggagcgggaaattgctgcgttctcaagccatctgcctatgcaccggccacctccgcagtgatccgcaaaatgatcacttccatttttccgccagaatatgtggcagtgatcgaagggggaagggaagaaaatgctatgctgctggaacagccctttgataaaatctttttcacaggcagcccggcaatggggagggtggtcatggagaaggcttccgcccggctcattccagtcactctggagctgggaggtaaaagtccctgcattgtggaaaagagtgcagatattcccagggcagtgaaaaggattttgtcaggcaagctcattaactgcggacagacctgtgtagcgccggattatattcttgtccaaaggcaggtgaagaccgcctttataaaggaactgaaggcgcagcttccccaattctacaggggagaggccctggacagtccaagctatcctgctatggtgaatgaaaagcactttaaccgggtgagaaagcttgtgacagacagtctttcccagggggcacatgctctgtctcctgtaaaattcattgaaaagaccaggcagatctctccggtgatcctcacagacgtaacctgggagatgcctgttatgaaagaagagattttcggacctgtgctgccggttctggaatttgatacatgggaacaggcagtggagctgcttcaggagaaagaaaagcctctggcgctgtatcttttcacaagaagccggtctgcccagagagtttttcttggaaatctgtccttcgggggcggctgtgtgaacgatacccttctccatctgtgtacttctcgtatggggtttggaggcgtgggtaacagtggtatgggagcctatcatggaagagagggctttgaaacctttactcataagaaaagtgtgctcctaaaaggagccgggccggatatcccgcttcgatacccgccatttacagcgccaaaggaaaaacttctccatattttaatgaagtgacagaaaatggaaaagagctgtcggcactttatagaaagtttacttgtgcatctcgggaaaatagagtaaaataaagtagggaatagattctcatttaagagaaaaggaggaagaggaatgaataaaaagaggtttttgaccgttatcatgactgtcatgatgatgttgtccctgcttccagccagtgtttttgcagctgaaggccaggcacctcaaggggttttggaaggcagactgaaggttaagggaacagcagcagtgggcagtacgctggaggccgatcttatggaggttaaacctcagggcctggagactgacgatgtaaattatcagtggtaccgcaaggcagccacggaagctgatatacaagcaggcggggatgccgcacagagcagcgaaaatgattatcaggaagagcagatgacatccgtgggtacagagtcctcctatgatatcagtgaggaagactgggattctgtgatcgtgctgaagatcacccccaaagaagacctgggtatcacaggaagtctttatgcaaaaaccgctgtggtcacagaagcagtttctgatgagacaggtttggaaaatgaaacacaggatgaaggaactcaggaaatgacagaagatggtcaggatgtctcccagcagggagaggaagggaaccaggtacagactccaaacgaagaggatcccttggattatgaccaggacgatgatttagtacctgtggaggatgaaaacaatccagtacaggatcaagaagttcctgatgaggatcaggagacctggaataacgatctggaaaatctggaccctgaggcagaccagccagatgactgggatacctacgatgatgagcttctggatcccattgttcccaatgaggatatgtcccaagaggatagtcaggacacggagtctggggtgacaccgccggacgctgagacggaacagcaggagggtaccccggatcctgaggatgataaaaaatatgttctggatacagacctttcggagaagcagcttcaatttaacattgaaagaacagattcctacacaggttctgattatatgctgcgtttctccatctttaataagggaacccagccgctcaccctggaaggggttactgtatcaggcaactatacctatccggatgtgtcggggattgttttgaatccggttccggaaggacaggaatctgcagagggcaacagcaatgaatttgtaatgtatgtacagcccgtggacggcctggaggatggaacttactctgaaattatgaagatcacgactctggaaggcgcggagctggagattaagctggatatgaccattacaacagtggaagcaccggtttaccagctcagtgtggacatgccggaagtggattttggcactgtggagcagaatgttttgataagcaatactcctcagcagacagtgacagtgactaacctgggcaaccagaatgtgactctggatcagccttacggaaataatttctgggcaggagagctgacagcagctcagcttgctcccggagaaagtgcaaaatttaccgtgtctccttccgatgcgctggcaacaggcaaatatgaggagacccttaccataacagacgatcagcagaaggcatctgtgaatgtagttctgaagatcaatgttgcggaggatgcttattatgagctgttcacagatcctgcacagctggatttcggtaccgtaagcctgggctaccagcctccggaaattcagactgttaccatcacaaataatggaaaccgcacgatcgagctgatggctccaaagtccgcaaactacaggatcggcaaattaagtgccacatccttaaaggcgggtgcatctgcatacttccggattcagcctaagaaggacctggccgcaggaacctacaatgaatctattaccatagccacagcagacggcaaggcagccacatctattcaggtgaacttctctgttcagggaaatgccctggtaagtgtacagaaccctggagcgatcagcaatctgccaaacggcacagagaaatcggttcaggcgttgggactttcgggcaaggttaccattcagacaacacagggagccaaggaggcaggggttacctgggatctgaacagcagctcctatgacccggcttccacaagcgcacagaactttacggtagctggaactatcaccctgcccaagggtgtgagcaatcccaataacgtgggccttggcgtcagcgtccaggtgacggtacagggatacaatcccaagatcgcagatcctgccaataatcagatcaccggtgtggatacacagaatggatatgcagcgggagcgcagatcgactttacagcagtaggcgcaggtatggacaacaccagccccagaaaaggggatgtgcggtatgtgcctctcaactggacagtgaagaatacctatgcctggcagcaggctccctacacaggcgctttcaagatgtctcttccaggagactatagtttgacggttgcctacaacagacaggtatttgacggaagcaactgggtggcagacggccagcaggatgtgaagaaggttaatttccgggtatatcaggtacttacgcctacaccgggtgcggcccagaacagcaacaacgacggcacaaagaaggcaggagttgccactggcgacaccacaccaatctttacctggatcgttgtacttcttgtggcagccatctgtgtagcagcaggaattatctacatgaagaaaaaaggcaaaaaataaagcgttcctttcataagcagctgagaaggaagggaacctggaggaaccggacgacctgatggctgtccggttcttttattacataggaaagttcttagaactttcctatgtaataaaaaccctccgggggatgcacacaatgtgcctgggaaagctgctttgcagctgcacattggtgcacaaagctaccaagcccctcatgagtgaggggatggggagttgaagcgggcttgtccgctttgttacgcagaaagctgcttcccagcagcgcattagcggacaaagctgcaaaattctaatttgttagcactcatttaaaatgagtgctaaatttttcttgacttttggtcaggaaggtattactatattgcctagagaacagaaaaaaataaatcattcagataaaggagtgtggaagtaatggctgtaaagcacggcagtttgtcaattaacagcgaaaatattttccctattattaaaaaatggctgtattccgaccatgatatctttgtgagggagatggtatccaacggatgtgatgccatcaccaagctgaagaagctggaggtcatgggagaatacaatttcccggatgactacaaggcgcagattcagattgttgtcaatccagaggagaaaaccctgaaatttattgacaatggtattggtatgaccgcagatgaggtggaggaatatatcacccagatcgctttttccggtgctacacagttcctggagaaatataaagacaagaccactgatgaccagatgatcgggcactttggactgggcttttactcagcctttatggttgccgatgaggttcatattgacaccttgtcttataaagaaggcgctgcccctgttcattggtcctgcgatggcggaacagagtatgaccttcaggagggctctaagaacactgttggtacagagattactcttttcctcaatgagtccagcgtggaattttccaatgagtaccgcatgagagaggtcattgagaaatattgttcctttatgcctgtgaatatctatctgtccaaggcaaatgctcctcaggaatatgagaccattgacgaggcagatttgaaagaggatgacgtgatcgttgaacgcatccatgaagaggctaagacggaagagaaagaaaatgaaaacggtgagaaggaaattgtggagatttcaccggcaaaggacaaggtgaagattaataagcgcccggtttctcttagtgatacccatcctctgtggatgaagcatcccaatgactgtaccgaggaggaatataaagatttctacagaaaagtattcatggattataaggagcctctgttctggattcatctgaacatggactatccatttaatctgaagggtattttatacttccccaagatcaatacagagtatgactccatcgagggtacgattaagctgtataacaatcaggtgtttattgcagacaatattaaagaggtcattccggaatttctccttctgcttaaaggggtgatcgactgtccggatctgcccctgaatgtatccagaagcgcactgcagaatgacggatttgtccagaaaatttccgaatacatcaccaagaaggtagcagacaagctcactggcatgtgtaagacagacagagaatcttatgaaaaatactgggatgatatcagccccttcatcaaatttggctgtattaaggaaaataaatttgaagacaagatgcatgactatatcctgtttaaaaacctggacggcaaatatctcaccttaaaagactgtgtggaggccaacaagaaagaagaggccaaagaggacacagcctctgaggagaccaaggaagagacccaggaagagacccaggaaaccgtggaggacaataaggctgaggaagaggaaaacaaggaagagaaagagccggagaagaccaccatcttctatgtgaccgatgaagtgcagcagagccagtatatcaatatgtttaaagaggcaggcaaggacgctgtgattctccgccacaacattgacagcgccttcatctctcatctggagcagaaggatcagaccatccagtttaagcgcattgatgcagacctgacagaggagatcaaggaagaaggggctgcagaccaggagatggccaagaagctcacagaactgttccggaagtctttgggcaaggagaagctggaggttcgggtggaaaagctgaaaaatgccaatgtttctgctatgatgaccttgtcagaggaaagccgccgtatgcaggatatgatgaaaatgtataacatgtacggcatggacccgggaatgttcggaggccaggagacactgatcctaaatgcaaatcatactcttgtccagtatctggcagaacatcaggaggaaaacaatgcaaagattctctgtgagcagctctatgacctggcaatgatcagccacaaacagctgtccccagaagagatgacgaaatttgtccttcggagtaacgaaattcttatgatgctgacaaaataaaggatttctaggaagcgggaatgttttaaaaaatcaggaaaggcctttcggttattaaatccagagggatttggccgagaggctttttttaatggtctaaaaggccaaagtaagaatgggatattttctttttttatgcacaagagtatgatagattcctgtggggaaaacgccggaatataggaggattctgggagaatagattataaccaggagggaggaaggagatttttctaggaaaatgtcgattatcggagagtaaatgcgacttttgtctaaattccacactttttgccattctgttctattatagaagggaagagaaaacgacaattacaagccctgtgagatttatggaagtagttttctgagtgtgagggaatccaagaaatggccgtattggagatttcataattttatagggcctcatttgtcgtgatcactacgtaaatttattaaaccaaggtgcagatgtttacacaaaggaggaaacctgatgaaggaaatctacaatataatacggcgcttaggaatcacagctaagtataaaggttattattttgtagcggaagctattgacattgcaagaaaagcacaggatgaaccattgatgataaccaaggatatttacccgcccatagccagtaaatataaggctactgccaaaagtgtggagcattccataagaaccgtgatcgatgtctgctggacaaataaaaaggaaacactggaagagattgtaggatatcctttagattacaggccgacaaacagtgaatttgtagacatgatcgcatattatttgaagcagaaataatgtacagatcaggtcaaagctgcacaaatgcaatgtcctgtaaacggaaaaattccatgaccttccggtcccaggcattgtccagagtcttgtccatagtaaatacccgaagagaggtacctgtggtgcaggaaagctcttctccattatattgaaagtttagatatagaccattgatatcctgattgttaacgggagcccctgattccagaagcacggtctgggtatttttcctagacaacaaaaaaaccatcttaaagtgaagcggcgtgcgttttcccctgattatcgaaaaacaaaaggctttggattcagaccatagggaataggaccttccggcctgtgccagggcatcggctgcgtctggctcatagaactctttgtgcaggctgccatcaatggtaaacgtattgtaggtagtaatggatgcttcaaccatccagaaggaatcgaaagcatttcctttgagaagcttgctcataaaacttttcacatccgtgattttaagtgcgatcatactgtaaactcctttctgatacagtataatgcatttcacaaaaaaaaaatagactttttttaaaaccccttttcaaacataggtaaatgtggtaaaatagacgtggtattgaaaactacatagtgtggaaaagaggacaaggttttgagctacaaaattgttatagatagttgtggagaattattggatgagtggaaagaggacagcaggtttcagtctgttccctttgttatgacagtagatgatgtggatattgtagatgatgatacttttgatcaggcagattttttgaaacggacagcagcctctcctgagtgtccaaagtcggcatgtccttcaccggaatgctatatgcaggcgtttaaaggggtggaagaacatgtatatgcggtgactatctcagccaatctcagcggctcttataacagtgcagaacttgggaagaagctggtgctggaggatgatccccataagaaaatccatgtgtttaattcctgttctgcatccattggagagactttgatcgctataaagattgtagaatgcgaggaagcggggcttccatttgaggatattgtaactcttgttgataattatatagaatcccaaaatactttttttgtacttgagaatctggaaaccttaaggaaaaacggccgtttaagcaaggcaaaggccctggtggctacagccttaaagattaagccggtcatgggggccaccccggagggaaccatctgccagcttgaccaagccagagggatcaacaaggcgctggtgaaaatggtggattatattgtggagaaaaccgctgacagccaggatcgggttttggccatttctcactgtaactgtgcccagagggcagagatggtgaaagaggcagttctcaagagaatgaatctgaaaaatgtggtgattctggaaacggccggactcagcagcatgtatgccaacgacgggggaattattgtagttgtataaggcttttcttttttcttaaaatatgttatactttcagcagtgacattatacgagaacaaaggagagtattgccatgagtcagaaaaaggtggatgcttacaaggcagagaaagcaaatcgtgataagcttataaagaaagaaaagcggatgctgcttttagagaagataattgcagtgttggtatgtgttgccgttgttgtgtggatcggctactctgttcatgggaagctgacagctgacgagcagccggcagaaccgactgttcagcagacagcagtggatgtttccgcaattgacgattatctcaacagtctgtctcagacggagtaggcggataaaaccaacaaaaaatggaatgtgcagaaaatataaaaagtctccggagtgcaccggggactttttatatttggctattagtcacataagtcgtaatagggcgtagttacaattataatatttgtgatatttataatttcgtaacgttagcagcctgcatgccacgagcgccttcggtcagttcataggttacggcctggccttcttccagagatttgaatccgtcgccgttgattgcagagaaatgtacgaaaacatcagctccgtcttctccggtgataaatccgtatcctttttctgcattgaaccattttactgttcccttgttcatagtgtgttacctccataaaaaataaaaaaattattgtttttctggcgaaaaaaatcaccagtttttacagactatatcatgtaatatataatctctaaaagctagtgatagttacattaaataatctcttcttattacgattataattccaggttatgcaattgtcaagtgtaaaaattgtagctttgcaaaggaattttttacaatttttatgttttcctattttatgggattccatgggaaagaatgaaaaatgttttgctaatatgtccgatttcgtgtatagtaatgtatatatggggaagtagacccagaatgctgtatgaaaggagatattcatatgggtatcttaatccaaaacggacgtgtgctggacccggccacggagacggaccagatctgtgatatttatctggccgatggaaaaattcaaaaagtaggtaaacagttgaaagcagccaaagatgatcaggttatcaatgcagagggctgttttgttatgcccggattggtggacatgcatgtccatttcagagatccgggacaagaatataaagaggaccttgagagcggttccaaagcagcagcccatgggggtgtgaccacagttgtcacaatgcccaacactaagccggtgatcgatagtccggaccggtatgcctatgtggtgaataaagcgaaacaagtatctaagattcatattctccagaccggcgccatcaccaaggatcaaaaaggggaggagctggcagatattgaggctatggcaaaagcaggagtcaaggccatctccgaggacggaaaatccgtgatgaacacccttctggccagaaaggctatggagaaagccgccaagctgaacattcccatcctggctcactgcgaggatgcagacctggtgtgcggaggctgcatgaatgaggacgagaattccaaaagactgcgtctgcccggaatctgtaattccacagaggacaccattgccgccagagacatgcttctggctaatgaattcggcgcccatctccacctgtgccactgttccacaaagggtgtggctctgatgatgaagagtgcaaaaaaggcgggcttccctgtatcagcagaagtctgcccccaccattttatcctcacctcggatgacattttaagggatgatcctaatttcaagatgaatcctcctcttcgaagaagagaggatgtggaagcccttatcgatggtctgaaggacggaaccattgaagtcatcagcactgaccacgctccccacagcccacaggacaaggcgggctccatgcgcaccgctgccttcggcattgtgggactggagacaagtctggctctcacctacaccgagctggtggacaaggggatcttaacaccccttcagatggtggagaagatgagctacaaccctgcaaagatcatgggacttgattgcggaacccttcaggagggacatcccgctgatgtggtgatcatggatccgagggctgcgtacgccattgacaaaaaccagttcttctcgaaaggaaagaacacccccttccacggaagaaaagtgaaaggcaaggttctgggaaccatctgtgatggaaaagtgatctacaaggacgaagagctgaaaatacaatagcaggaggaaaacaccaatgattcagaagctgattgaaaatataaagaagacaaatgcccccattgtggtgggcctggacccaatgctgggttatattccaaagcacatccaggacaaggcgtttaaggaatacggcgagaccctggagggtgcggcagaggccatctggcagtttaacaaagggatcgtggacgcagtttatgacctgatcccagccgtcaaacctcagattgccatgtatgagcagtttggcgttgaaggcgtgaaggcctacaagaagaccattgattactgtaaggaaaaaggccttgttgtcatcggagatattaagagaggggacatcggctccacctcagcagcctacgccgtaggacacctgggcagagtgcaggtgggaagcaagacttatgcaggctttgacgaggattttgccaccttgaacccttacatgggttccgacagtgtgaagccctttatccaagtgtgtaaggaggagaaaaaaggactgttcattttggtgaagacctccaatccctccagtggagaatttcaggaccggcttattgatggacgtcctctgtatgagtgggtgggagaaaaagttgcccagtggggagaagaccatatgggagacacttacagctatgtgggagctgtggtgggcgccacctatccggaaatgggcaggaccttgagaaaacttatgccaaagacctttatcctggttcccggctatggggcccagggaggaaaaggcgcggatctggtgcactttttcaatgaagacggtctgggagccattgtaaattcctccagaggaatcatcgctgcctacaagcaggacaaatatgcggcctttggtgagctgggatatggggatgcatcccgccaggctgttctggacatgatcgcagacattgacggcgcactgaaaaaccgctgagaaggagctggattatcatgagtacaaaggtgaaagaaagcctgaccattgtcagtcaagaggcgattggaaccgggattttcagcatgtggctgcagacagagcaaatgacgcagcttgcccatgcaggacagttcctttccttatataccagggatgcggggaaactgctcccacgtcccatcagcatctgtgagattgacaaggaaaagggccggatccgtctggtataccgggtgacgggaaaaggcacgggcacagaagaattttccagacttcataagggaatcaccctggaggccgtggggcctttgggaaacgggtttcccctggaagaggccaagggaaaaaccgtgcttcttttgggaggaggcattggaatccctcccatgctggagacagccagggagcttcaggcgcagaagaaaattgttgtgggttatagagacgagtgcttcctcacagaagagctgaagagccagggagaggtgtatgtggccacagaggacggcagtgccgggaccagaggcaatgtgctggatgcagtgagagcccacggcctggaggcagatgtgatttttgcctgcggacccacgcccatgcttcgggccatcaaggactatgctttggaaaaaaatattccctgctggatctccatggaggagagaatggcctgcggaatcggtgcctgtctggcctgtgtgtgtaagtctaaggatgtggacagccacacccatgtgtacaacaagcgcatttgtaaagatggtcctgtattcttaagcacggaggtggagctctgatgaatatgaaagtaaatctggccgggatcgagttaaagaacccggtaatgactgcatcgggaacctttggctccggggcagaatacagcgaatttgtagatttgagcagacttggagctgtggtcaccaaaggagtggccaatgtaccctggtctggaaatcccacccccagagtggcagagacctacggggggatgcttaatgccatcggccttcagaatccggggatggaggtattctgtgaaagagatctgccctttctgaagaagttcgacaccagggtgatcgtgaatgtatgtggaaaaaccacggaggaatactgcgaagttgtggagcggctggctgacgagccggtggatctgctggaaattaatatttcctgtccaaatgtaaaggaaggcggcattgccttcggacagaaccccaaggctgtggaggccatcactgctgagatcaagaaacgggcaaagcagcccattatcatgaagctgagccccaatgtgacagatattacagagactgccagggcagcagaggcaggcggggcagatgtgctctccctgatcaacaccctgacaggaatgaagattgatattaaccgccgaacctttgccctggccaacaagaccggaggcatgagcggacctgcagtgaagcctgtagctgttcgtatggtgtaccagactgccaatgcagtaaagcttcctattattggaatgggcggcatcgccaccccggaggatgccctggaatttatcatggcaggagccactgccgtatctgtgggaacagccaatttcttcaatccccgggccacggtggagattatcgaagggattgagcagtatatggttcagaatcaggtggaagatatccgggaattaataggtgttgtaaaatagacggccttcgtttatgatagaaggagtagaggcgctgccggtcatatgggaatcagcagtatagaagaccctaatggaggaataataattatggaagcatacaaacaggaatttatcgaatttatgattgactgcaatgtgttgaaattcggagactttgtcaccaagagcggaagaaagaccccgttttttgtaaatacaggcttttaccgcaccggtgcccagctccgcaggctgggagaatattatgcaaaggccattgaaagtaaattcggtctggatttcgatgtacttttcgggcctgcctacaaaggaatccccctaaccgtggctgccacaatggccatcagtgagatctacggcagagacatccgttattgctccaaccgtaaggaagtcaaggaccacggggataaggggatccttctgggaagccctattcaggacaaagacagggtggtgatcatcgaggatgtgaccacagcgggaacctccattcaggagaccctgcccattatcaaggctcaaggaaaggtagagcctgtgggactggtggtatctgtggaccgtatggagagaggccagggaacgaagagtgccctcaaggagattgaagagacctatgggctgaaaactaccgccattgtcaccatggcagaggtggttgagcatctgtacaacaaagaatacaaaggaaaagtcattattgatgataccttaaaggcagccattgacgcatactatgaacagtatggagcgcagtaattcagcaggaggaaatcggcatgaatgaaaagatttataggaccatgtccagaacaggggccggcagcctggcaattggtatcgtagtgcttgcaacaggcattgtaacaggagttctcatgatcattaacggggcaaaactgttaaagagaaaagatgatgtaataatctgaaacaaaagagcagaaagtcacacgaaagccgtgtggctttttgaacggaggccaaagccggagggaagaaccggcctggccggttgtttcagtcagagggagtttgtgtgagtagggaaacaaaaaaagccatcagaggggcaggtaccgtgctgtttcttatttatgtggcacttttgatctattttctttttttctccgagtcctacggccgggtggcccaggcggagcgggaatatagatataatctgatgccctttgtggaaatccgcaggttttgggagtaccgggaacagcttggcatatttgccttgtttaccaatatttttggaaacgtgatcgggtttctgccctatggtttcattctccccatcatttggggaaatatgagaaacggtgtgctgatcacggtttccgggtttgctctgagccttggagtggagaccatacagctgatcacaaaggtaggctgctttgatgtggacgatatgattttaaataccctgggtgcggcctttgggtatctgttattttttatctgcgataaaataaggagaggatactatggcaagaagatatagatatgcgtttgcgaagaaaaaagaagccccggagggcaaaatctctctgggtacggctgtggcttcgctggtgctgtttttggccgcgatcctggtatcctttatcagagacggaaacggcggggtgatcaccgggggcatctgcatttttgccatgctcctctctgtatatggctttatccaggggctgaaaagcttttctgtggaaaatgctgcccaccgtttcagcattgtggggtccattgccaatgggatcattatggtgtcctggcttgggctgtttttaataggagtgtgagaagatggaacgtttggaacagcagctgcagtttattttggaagtggataaggtaaaaaatattttccgtcagacctatctggcagacggaaaccgaaaagaaaatgatgccgagcattcctggcatctggcccttatggccgtggtgctcaaagagtatgcccctggcgatgtggatctggccaaggtaattcccatggttctcatccatgatctggtggagatcgatgcaggggacacctatgcctacgatgaggccggggcagccaccaagcgagccagggaggaaaaagctgcagaccggattttcggcctgctcccacaagatcaggcagagactttccgctgcctgtgggaggaatttgaggcttatgagaccctggaggccaagtatgcccacatgctggacaacagccagcccctgtttttaaataatgccacagacggcatcagctgggcagagcatcaggtgaagaaaagtcagatctataaacgcaatgccaagactgttcagggcgctcctgctatttgggagaagatggagcaggtagtggaagcgcatattaaaaaagggaacattattgacgatatggacaaatcacaagaataaaagaggttgagagattggacgagtggattttagaacggtttgagctggccagggaccgggtcctggagatcacaacagaggaaaccgtgcaggagccctatggggaatatttccgtgttgtggctggttttctgaaaatggtcctggaggaaaccagggatcttaaaaaagaggagagcctggaagaactgaagatccggaacaggcgcctctatgaggacatcctccccgaaaattatgggacatcctatggaaatccggcctatgccgtggaggtgctgggagagtacggggaattgctgagcttcctatatacagagctgcggggaatgatcccctatgcctatgagaagaaggtgtgggacatgaccgtgggactggaattgttcctggaggtgtattcctctttccaaggagaggagccaggggaagcagaagagattaagaacattttaggttcctatgtaaatgattactgtcaagagatggtggaggagcgcatccgggcatcggtggatccttcggaggattttattgtgcgtgctcttatggaggcggaccttacagacccccggtatctatacaggtttggagagtatgtatctgacaatgagctgggcgttatggagtttctgggaaaactgccccaggaggaagtggatgccatggcccgcacctacacagaagggtaccgcatcggttttgtaaccggcagaaaggacctgtccaagaaaaagacagtgaatatccgttaccagcttgggtttgagcggatggtaaaggcagccgtgcaccagtttgaggagatggggctgcagcctgtcatttaccgggctgcttcccatgcagtgaacaagaaaagccagcaccgcattggctttcagggggggaatcccaatccccagtttgactatgatcacagacaggacaacgccctgtttctggatgcagaatttgtaggaaagaagctgcgggccctgcagacctcctatgagaaataccaggacctggccaaagtccatgcaggcccggcatgtatcgagacctttggggagaagccctttgcaccggaaaataagcctcaggctctgcgtctgactcaggcccagcagcagcttttggtggagctggataatgaaagcggccagattgtgaaccggtacattcctggggacgagagaagctttaccattatcgcctatccggtgccggagatcgggccggatttcccaaagattttccaagaaatcgtcaaggtgaacaatctggactataagcagtaccagagaatccagcagaccatcatcgacaccctggatacctgtgagtgggtggaggtgaagggggccggtgacaatgagacagaccttctcatccaccttcatgagctaagtgatccgcacacacagaccaattttgaaaactgtgtggcagatgtaaacatcccagtgggtgaggtctttacctctccccagctggcaggcaccggcggggtgctccatgtgagccaggtatatctgaacggactgctgttcaaggacctgaagctggtttttgactgcggccaggtgattgattattcctgtgccaacttccccactcaggaggagaaccgcagctatattgaggacaatatcctctttcatcaccagaagatccccatgggagagtttgccattggaaccaacaccaccgcttatgtgatggcgcagaaatatcacattgcagacaagcttcccattctcattgcagagaagatgggaccgcattttgcagtgggagatacctgctacagctggagcgaggacactgcggtgtacaatcccgacggcaaggagatcattgccagagacaatgagatctctgctctgaggaaggaggatatcagcctggcatattatggctgccacacagatatcaccattccttatgaagagcttgccagcatccgggtcattaacgacaacggggatatggtctccattattgaggaaggcagattcgtgcttccgggaactcaggagctgaatgcaccctttgggaaaaaatagccctcaatggaatattgacagaacaagggaaacttagtatgattgccattggaagaatcccccggagggttagaggttttccgggagaacaacggcgggggtgctgtcctgtgtcaagcagcatcccagaaggaactgtctgctcacgcagacatcaccaggaatgaaggccggctgcgaagcgcggatgcgctcctgccaccggcccatgtcggggctttcataaaaaaataaatcacagaaagaggagagaattatggcaaaagtaggaattgttatgggcagcgactcagatatgcccatcatgagcaaagcagcagatattttggaaaaactgggaatcgagtatgaaatgaagatcatctctgcacatagagagccggatgtattctttgaatatgcaaaatccgcagaggaaaaaggattcaaggtgatcatcgcaggggcaggaatggcagcacatcttcccggtatgtgcgcagcgattttccccatgccggtaatcggaattcctatgcataccacctccctgggaggaagagactctctttattccattgtacagatgccttccggtattcctgtggcaactgttgccatcaacggcggagccaatgcaggacttctggcagccaagatcctggccacttctgatgaggcccttctggaaaaattaaaagcctacagccaggagctgaaggagcaggtggaagccaaggatgcaagattacaggaagtgggatataagaactactaagaagacttgggctgccccaagggggacaagatttcagtcatagatacggaggatgattatggattacaagaatgcgggcgtggatattgaagcaggttataagtcagtggaattgatgaaaaagcacattgccaagaccatgaggcctgaggtgctgggcggcatcggcggattttccggcgctttttccatgaacaaatttaaggacatggaggagcctaccttagtttccggaaccgatggtgtgggaactaagctgaagctggcttttctcatggacaagcatgatacagtagggattgactgtgtggccatgtgtgtaaatgacattgcctgtgcaggaggagaaccgctgtttttcctggattatattgcctgcggcaagaacttcccggagaagatcgcagaaatcgtaggcggtgtggctgacggctgtgagcagtccggggctgccctcatcggcggagagacggcagagatgccaggcttttatccagaagacgaatacgatctggctggatttgccgtgggtgttgtggataagaaggatttgatcactggagaggagattcaggttggggacgtgctcatcggcatggcatcctccggtgtacatagcaacggattttctctggtgcgtaaggtattttccatgacaaaggaagctctggatacgtattatgaggagctgggagctaccttgggagagacccttattgcccccactaagatttatgtaaaagcattaaagagcattaagaatgcaggcgtgagaatccatggctgcagccatatcacaggaggcggcttctatgaaaatgtgccccgcatgctcaaagagggcacccgggcagttatcgagaaggacagctatcccgtgcttcctatcttcaagctgttggctaagactggggacattgaggagaaaatgatgtacaacacctacaatatgggacttggcatgatcatggccgtagatcccgcagatgtggacaagaccatggaagccattggtgcagccggggaaactccttatgtagtaggaaaaattgaagccggggaaaagggagtgaccttatgctgagattaggtgtgctggtttccgggggaggaaccaatctccaggccatttttgatgccctggatgagggaaggatcacaaatgcctgtgtgcagaccgtgatcagcaacaattctggtgcctatgctctggagcgggcaaagacacggggaatctgtgccaagtgtatttctcccaagagctatgccacaagggatgaatttcatgaggccctgttacaggagctgaaggagcagcaggtggatctggtggtgctggccggctatttagtggcaatcccccctgtgatcgtggatgcattcccaaataagatcgtaaatatccatccgtccctgatcccttccttctgcggagtgggttactatgggctgaaggtccatgagggagttcttgccagaggagtgaaggtcactggagccacggtacatttcgtggacaacggtacggatacaggtcccatcatccttcagaaggcggtggaggtccttgggggagacaccccggaaattctccagagacgagtgatggagcaggccgagtgggtgatcctgccaaaggccattgatttaattgccaacgataaaattattctgtccaatggaattgttaccataaaggagtaagctcatgaaagtattaatagtaggaagcggcggaagagagcacgccattgcctggagtgtggcaaaaagtccaaaggttgagaaaatttactgtgcacctggaaatgcaggtattgcccagtatgcccagtgtgtgcccatcggcgccatggaatttgaaaaattagcggattttgcagagaaagaggccattgacctgacggtcatcggcatggatgatcccctggtgggaggcattgtggatgtatttgaggagaagggcctgcgggtctttggcccaagaaagaatgccgccattctggaaggctccaaggcattttccaaggacctgatgaaaaaatacaacattcccacagcaggctacgagaatttcaatgacccggccagggcgctggaatatttggaaaaagaagccaggttccccattgtattaaaggctgacggcctggcattgggcaagggcgtactcatctgcaagactctggaggaggcccgtgcaggggtgaaggagatcatggaggacaagaaatttggctctgcgggaaataccatggtcatcgaagagtttatgacaggccgggaagtgtctgtgctgtcctttgtggacggcaggaccatcaagaccatgacctccgcccaggaccacaagagggcccaggacggggaccagggactgaatacaggggggatgggaaccttttctcccagtcctttctatacccaagaggtggatgaattctgccggaaatatatttatcaggcaacggtggacgccatggcggcagagggaagaccctttgtgggaattattttcttcggtctcatgctcacccaggacgggcccaaggtgctggagtacaatgcacgcttcggggacccagaagcccaggtggtgcttccccgcatgaaaaatgatctggtagaggtgatggaagcctgtgtggacggccgtctggacaccattgacctggagtttgaggacaatgcggcggtgtgtgtggttctggccagcgatggatacccagtgcattatgagaaggggattcccatgactggctttgagaattttcacggcaaaggaggatattactgcttccacgcagggacaaaatttgagggagaccagattgtcaccaatggcggccgtgtgctggggatcactgccctgggcagagatctgaaggaagccagaaaaaatgcttaccaggcaacggaatggatttccttttccaataaatatatgcgccatgatattggaaaggccattgacgaggcatagagttttaacgtgtgaggaggaattggcatgtattttgttaagaatattacacaggatatctgctgggtgggcgccagtgacagaagactggccctgtttgaaaatatttttcccattcccagaggagtttcctataatgcttacgttttgatggatgagaaaacagtgcttctggacacagtggacaagaccgtgagcagtcagttttttgaaaatctggaatacgttctggacggacgttctctggattatttgatcgtaaatcatatggagccggatcactgtgcaaccatagaagatgtggtgctgcgttatccccaggtgaaaatcgtgggcaatgccaagacctttaccatgatgaagcagttctttgattttgatgtggatgcccatgccatggtgatcaaggagggggataccctctccacaggcacccataccctgacctttgccatgatccccatggttcactggccggaagctatggtcacttatgatacgaaggacaaggtactgttcagtgccgatgcctttggaaccttcggagccctgagcggcaatatttttgccgatgagatggattttgagaaggattggctggaggatgccagaagatatctcaccaacattgtgggaaaatatggggttcaggttcaggcagccctgaaaaaagctgccgctttggatattcagatcatttgtcctctccacggtcctgtgtggagagagaatctacaatggtttattgacaaatatcagaaatggagcacctacacccctgaagaccactgtgtgatgatcgcctatgcatccatatatggaaacacagagagcgcggtcaacgccttggctggaaagctggcccaggcaggggagaagaggatcgttatgtacgatgtgtctgtgacagatccttcctatattgtatctgaggctttccggtgtgaccggctggtgttcgcctcccccacctacaacgcaggcatcttccccaagatggaggccgtgctgctggatctgaaggcccataatcttcagaacagaaaagcagcagtcatggagaacggaacctgggccatctctgcaggaaagcagatgaaggagctcttgtcccagatgaagaacatgaccatcatggaggatacggtgacggtgaaatcttctatgaaggagagccagatggaacaactggatgccattgtggactttttgtgcaaataatcacactggcccttttatgggcctgttatggagccaaatgcttctataaaagtatcatttttataaaactcacggggacagagaaatctgcctccgtttgtttttgcagaaaaacctatggattttcggaataaatttgacaatttttctggaaaaaagtaaaatacctgtagatactacatggttaaaggggcagatttctaactgctccaaataagaagttccaggaggatcgtgttatgatgaaaaaaatcaaaaaagctgttttggtgtgtaccctcactgcaggcgttctgacaggctccctggcagccgtgcagggggcgcagacctctggccctacaattgaccaagacacagagatcaatgtatttatagcagcaagcctggaaaatgcgtttcaggaattgatccctctgtatgaaaaaaaacagcccaaggtgaaagtgacctacaacgcagacagctccggaacccttctcacccagatccaagaggggtatgaatgtgatatcttcttctcagcagccacaaagcagatggatgctttgcaggaggacgcacttgtgatagaaggaacctacaggaaccttctggagaatgaagtggtggtgattgcgggaaaagacagcgggaccaaggtgacgggcctgaaggacatggacaaggcccagagcatcgccctggcagacggcagcgtccctgtaggaaaatatacaaggcaggccatggtcaatgcaggagtcctggataaggtccaggacgtatcaaagataactacccaggagattatggacaagctgggaactgagatcaacgagtgctccaatgtgagcaaggtaaaagaggcagtgaaagagggctcctgtgaagtgggaacggtttattacacagatgcctactctgttattgaccaggtggacatcctggagcatgtgagcaaggaccttaccggggagatcatctaccctgctgccagagtggtcaacgaggaggcagatcaggtccagatggaagcggcagatgatttcttctcattcctctgttctcaggaagccatggaaatatttgaaaaatatctgtatatcccatatgaaaaaaatgaaggctgatgcaggacaaccgctgcctttcactggctatgggcagatccggggccgtgaagggacagggatacacagcgcctggggagaggaagaaattcctgtccttcgggcgctttcctatggaataaaaaacctctgggggatgcacacaatgtgccagggaaagctgcttcccagcagcacagcagctcacaagagctggaaaggaaggagaatgtgttatgggagaaattatcaagaatctggattggagtccgctgatcatttcattaaaaacaggctttgtggccacggttatctgcttttttctgggaatttttgcagccaggaaggtgcttcaggcaggtcccaagacgagggcctttgtggatggacttctcaccctgcccatggtgctgccgcctacggtggcaggcttctttctgctgcttttgttcagcaggaaacggcctttgggaaccctgctttttgaccaattcggcatcaaggtggtccagagctggctgggctgtatcatagccgcctccgtcattgcctttcccctgatgtaccgcaatgccagggctgcctttgagcaggtggacgtcaatctcatttacgccgggcgcaccctgggaatgagtgagctgaaaattttctggaagatcgtgatcccctgtgcaggtccgggggtggcctccgggactatcctcacttttgccagagcccttggagaatatggggccacctccatgctggcgggaaacattccgggaaaaacaggaactatttcccagagaatcgctatggtgatccaggacggggattatatgacggctggagtgtgggtgatcatcatcgttgtttttgcctttgccatcatattcattatgaatctgatctcgtcaggtaaaagaaagaacaggaagcgctggtagggagggaagaatatggcactggaaatagagatcaagaaaaaatatcagggatttcttttggacgtgaagttttcctcccaggaaaaccgcctggggatcttaggggcctccggggcaggcaaaagcatgatcctgaaatgtcttgcgggcattgtcacaccggacgagggccggatccttatggacggccgggtgttttttgacaaaaagcagaaaatcaatgtacctgccagagaacgcaggattgggtacctgtttcagaactatgccctttttccaaatatgactgtggaaaaaaacgtggctgcagggatccgggcgggaaggaaggaacgtaaggagaaggtgcaagcgctcctgaatcgtttccaactggacgggctggaggatcattatccctcccagctctccggaggccagcagcagagagtggccctggccagaattctggcctgtgagcccgccatgatccttatggacgagcccttcagcgccctggacggccatctgaaggagaaaatgcagattgagatgaagaagattctggaggattttccaggaatggcggtgatggtcacccacagcagggatgagatctaccggtttagccaggagctgctggttataagcaggggcagaagcgtccatatggggaaaacccgccaggtcttccatgatcctgtgaaggtggaggcggccagacttactggctgcaagaatatctcccctattcagaaaatcggtccccatgagcttctggccctggactggaatctgtatcttcacacccagcgcccggttgagggggcaggctatgtgggaatccgggcccacgacttgaccccggggcataaaggggaggaaaacacctatgagatggatctggtggatgtgacggattctccctttgagcgggtatatcaggtgaaagagcaccatatcggagctgaaggccagcccatctggtggaagatgcagagaaatctggactgggaggatcagaaagagacttttccgaaatatttaaagtttcccaaagaaaggctgctccttctggaagattaaccggtattttgttgaaattttctttattttataatagaatagaagaatatatagtgatacaggagaaaaggtatgtgtgacgggttcaatgaggagatccggcggcggcttaaggaagcggcggaggaaaaatacaggaaattccagggaggacttcttccgggtacggacaaccttctgggggtccgcattcccattcttcggaacatggccagggagattgtcaaaggagactggagagcctggctggccggagctgatgaaaggacttatgaggaaaccatgcttcagggatttgtcatcggctatgcccaggtagaaccggaagagaaattttcctatatcaggcagtttgtccccaagatcaacaactggtccgtgtgcgacagcttctgcagtaccttaaagcttgcagacaaatatccggagcagatgtgggagctgatcgtatcctatgctgcctcttccaaggaatatcaggcccggttcgccgcagtcatgctgctgtgccactatgtgaaggaagagtaccgggaacgggccctgaaggttctggaggggatctgtcaggaaggctattatgccaggatggcggtggcctgggctctgtccatatactttgcagcattcccggaggttatgctgccatatctgaagcaggcttcctatgaagaatttacttataagaagacactccagaaaatcatagaatccagccgggtggacaaaaatatgaaaaaaatcattcaagaaatgagatagagaggaaagaaacatgaacaagcaagaagcaatcaaacatctgcagaacgacgagacctttttcgtagccttttcccaggttacccagcagccttatgtgacctgtgacgaggagacctacaatgaccaggtgtggatttttaccacagaggaggaagtgaaggagtttggcaagcattgtctggatgacaaggtgctgctggcaggtgtgcaggtagccaagaagcagtatccaaaattctacggaacccttcatgccattggcgtgaacagcattgtgttccagatgggagaggacaaaattgaggtggagctcacggatgtggcaagacaggcagatttctcccagctccccccagagagagtaccccttctcaatcccgcccttcagctctccggcatttatttcatgcaggagctgcgccgtccggtgaagcaggaggagcataagaatctgcgggcattggaggaggagcttctggccaatttaagaaaagccagttacctcattgccctggagccctcccaggaagacgagaagaaggtaaatgttccttatctgaaaaataaagacggcaagattttccagccagcatttaccgatgccatggagctggagaagtttgtaaagggacggaaaatgaggatcctcaaggtgcccttccaggagctgaaaaagctgctgatcaaggacgcagaaggatatgtgatcaatccccagggctttaacctggcgcttaccaggatccagttagacaggatcgtaggagcataggaaggaagagcacacattgggacttgcggagttatttatactggctgtaggcctttccatggatgcctttgcagtgtctgtctgcaagggactctccatgggaaagatgaagtggaaatatgcttttctggcaggcctttatttcgggggcttccaggcaggaatgccgctgatcggatattttctgggaagccagttcaaggatgtgatcagcagcattgaccactgggtcgctttcgttctgctgggcatcatcggcattaacatgatccgggagtccagggacaaggaagcctgtaccctggatgattcctttgatgtaaagagcatgcttcttatggcagtggccaccagcattgatgctctggcggtgggggtcacttttgccttcctccaggttgacattgtgccggcggtaacctttattggagtggtaacctttgtattttccgcagcaggaattaagattggaaatctcttcggatgccgcttccgctcccgggcggagcttatgggaggggttatcctggtctgccttgggacaaaaattctcctggagcatttaggagtattctagcagacctgagaaatcccctgcttgaaaactctcaagaaataagaggcggtttggaatgttagaaatcttctattaagaaagggctggtaggaatatgaaaactgtgatcgtgggaattgcaggaggcactgcctcaggaaaaacaacggttgtccagaaactgagtgaattttttccggatgagatcagtgtgatctgtcatgactactactatcttcctcatgacgatatgacctatgaggagaggacccatctgaattatgatcatccctgtgcctttgagaccgaacggctggtgaaggatattgccaggctgaagagcggagaggctgtggaatgtccccaatatgactttaccatacataaccggtccaaggaggtgctgcgcattgagccaaaaccagtgatcattgtggatgggattttagtgttggaggatgaacgcctgcgtgatcttatggatgtgaagatctttgtggataccgatgcagacgaacgcctgaaacgccgcctgatccgtgatatgaaggagcgggggaggagtattgagtccatattgaaccaatataccaacaccgtaaaacccatgcatgagcagttcgtggagccctccaagcgttatgcggatattattatcccacggggcggcaagaacaaggcagccttagagatgctgaaaaattatatgcttcatttgataaatgatggagacagccaaacgattcattgagaaatgcacaaagagccaaagcctgtatttatattaataataggttctggctctttttgtgtctggcagtctgtgtgggtggtgcgccggatcatgagcttccagagatttttcctgaattttgttattggaaatttatgaattatgtgctaatatacctataacaaataatggcagcctcttttcggggcagttcatctattatttgctgcggagaaagcatccgcatgagatacataagatggaggtggttaccacgtatattgaaatagattttaacagcgatgaagccatatatatgcagctcaccaatcagatcatcatggacattgccgctgagaggctgcgggagggagattccctgccctctgtgcgtcagcttgcagatttgatcggaatcaacatgcatacagtaaacaaagcctattctgtgctccgccaggaaggttttgtgaccattgaccgaagaaaaggagccgttatttccatagacggtgataaaatgcgggcgcttcaggagatgaaggaggttttatccgtgctcctggcaaagggacggtgcaaaaatatctccagggatgaagtccatgaactgattgaccagatttttgacgactatgaagaaaagtgataaggaggacaatatgcaggaaaaatttaccagacaggcccaggaggccttgacactggcgaagaaaaccgcattgtattgtaaacacagctatattgggacagagcatatcctcatcggccttcttaaggctgtggacggaaccgccagccaggtcctgtctgactttggagtggaggaggagaagctgctttccttaattgaccagctcatcgcccctccctcccaggtgctcaccaagggcaggccggaatatacccccagggcggagaagatcttaaaaggagcacaggaggaagcacaggccatggaggcaggccttattggaacagagcatatcctcatggctgttttaaaagagacggactgtgtggcaacccgtctgctccataccatgggaattcagatctcccgcctgtttgtgggaattctggtggctgtgggagcggacggcagatatgccctggaggatctgaacagcggaagggccatgaaggccgggggcagcgtgagcacccccaccctggaccagtacagccgggatcttactttgctggcagccaaaggccagctggacccagttgtgggaagagagaaggaaatctcccgcctgatccagattctcagcagaaggacgaagaacaacccctgtctggtaggagaaccaggagtgggcaaaaccgccattgccgaggggctggcccagagaatcgtggatggtatggtgccggatacggtgaaaaacaagcgtctggtggtgctggatctgtccggcatggttgcaggaagcaagtacagaggagagtttgaggaacggatcaaaaacgtggtcaatgaggtaaaggagcacaagggggttcttttgtttattgacgagctgcacaccattatcggcgctggaggggcggaaggggccctggatgcttccaatatcttaaagccctctctgtccaggggagagattcagctgattggagccaccactcttgaggagtacagaaagtatattgagaaggacgcggccctggagcggcgtttccagccggtgacggtggaggagccaacccaggaggagaccgtggagatcctaaaaggcctgcgcccctattatgaggagcatcataaggtgaagatcaccgatgaagctctggaggcagcggtgaaaatgtctgtgcggtatattaacgaccgtttcctgccggataaggccattgacattattgacgaggcagcttccaaggtgcagctggagggttatcagatgccccaggatgtgaatcttctggaaaaggagatccaccgcattctttcagataaggagacagctctgaaacaggcagacctgcagatggccaaggagcttcaggcccgccagaaccaattggaggaggagcttaagaaaaagaaggaaaaggcagcaagaagccagaaaaaaaagaaacgagaagtggatcaggaggtcattgccgacattgtagcaggctggaccaagattcctgtgaaaaagctggaagagggagaatccaagcgtctagcccgtctggagaaggtgctccacaagcgggtgatcggccaggaggaggctgtgaaggctgtggcccaggcagtgaagcggggacgtgtgggtctgaaggaccctgcccgccccatcggctccttcctgttcttaggccccactggtgtggggaagacagagctttccaaggccctggcagaagctgttttcggaagtgagtcggccatgatccgggttgatatgtcggagtatatggagaagcacagcgtgtccaagcttatcggctctccacctggatatgtgggctatgatgagggaggacagctcagtgagaaggtgcgcagaaatccctatagcgtactgctctttgatgagattgagaaggcccacccagatgtatttaatattcttctgcaggtgctggatgatggacatatcacagacgcccacggacggaaggtggatttcaaacagaccatcatcattatgacttccaatgcaggagcccaggccatcattgaacccaagcggctgggctttggggcacaggaggatgagaagaaggactatgagcgtatgaagagcggggttatggaggaggtgcgccggatgtttaagccggagttcctgaaccgtattgacgagattatggtctttcatacactgaacaaggagcatattcgaaagattgtggatctgctgctgaagaatctggaaaagcgctgccaggagcagcttcatatagagctcaaggtaagcactgccgtgcgcaatcatctggctgacaaaggatttgataataagtatggagccagacctctgcgccgggccattcagacccaaattgaagaccagatggccaacgagatcttggaaggacggataaaagccggggaggttgtccacgtacggctgtccaaggatcaaatccttttcagcacagatgaaaatgtaaaaagtgtctaaaaactggaaaagaaactggcaatctctcaggttttattatataatgaactcacaaagacataacaatagatatcaatctatgggaggataaaagaatgtcagcagtgaaagaacttttaagaacagaagcagacggaaccatcagctttggagattatgaattaggcacgaaatctaagctttctgactacgagcatcagggcgatatgtataaagtgaaaaccttctctgagattaccaagcttgaaagaaacggaatgtttgtctatgaatccaccccgggtaccactgttttaaatatgagtcaggatggacagggaatgaatttcaaggtggaaggtcctgaggatgcccagatcaccgttgagctggaggctgacacagagtacgaaatctttctggacgacatgaatgtggggaagatgaagaccaatctgggaggaaagctttccttcagtgtggagcttgagaaaacagaacaggttgatgtgaagattgttaaaatgtaaaggattttagagggtgttgcttagggaacaccctctctttgcgtctgaatatagaaaggaaagaatttcatggcaaaaggaacaaaaagcatttttttctgccagagctgcggttttgagtctgccaagtggatgggacagtgtccgggctgccggcagtggaatacctttgtggaggagaccgtctctgcaaagacagccgccaaggcgggaaaaccccagtcaaaaatgtcggagcccaaaactctggaggagatcgatctaaaggaggatgagcgcaagacctgcggaatgggagagctggaccgggtgctgggcggaggcattgtccagggctccctggttttagtgggaggtgacccgggaatcggaaaatccaccctgcttcttcaggtgtgcaggaacctggccaaggacgggaccagcgtgctgtatatttccggggaggaatctctgcgccagatcaagcttcgggccacccgcatcggcagttttacagacaagctgtcccttctgtgcgagaccaatctggagcggatccgggaggttattgaacggaaaaagccccaggttgtcatcattgattccatccagaccatgttccatgaggacatctcctctgccccgggaagtgtgtcccaggtgcgggagtccaccaatgtgctcatgcagatcgccaagggacagggagtgagcatttttattgtgggccatgtgactaaggagggaagcgtggcagggccgcgggtgctggagcacatggtggacacagtactttactttgagggggaccgccatgcctcctaccgcatattacgggcagtgaaaaaccggtttgggtctaccaacgagattggtgtgtttgaaatgcgggacgtgggcctggaggaggtaaaaaatccttccgagtttcttctgaacggaaggcccaaggatgcctctggctgtgtggtggcctgctccatggaggggacccgtcccatactggtggagattcaagcactggtgtgccagagcaatttcgggctgcccagaaggacagccgtgggaacagactataaccgggtgaatctgcttatggctgtactggagcggaaggtgggcgtgcacctggcccagtcggacgcctatgtgaacattgcagggggcatgaagatgacagaacctgccattgacctgggaatctcactggccattgtatccagctacaaggacattgtgattccggacacggtgatggcctttggggagattggactgagcggagaggtccgggctgtgggcatggcagaacagagagttctggaagccaggaaactgggctttgacaccgtgatccttcctaaggtgtgtgagagcacggtgaagaatctgtcaggcatccgcctggtgtatgtggaaagcatacgggacgctattaattttatcagaaatccaagctgagcctctggaaaatccaggaattttactttccgggaaaagtgatacgtttcttgattttttattatagatgatttttttaatatctcttacaataagagttagcaaaaaggaatcccaaggatcaagaaaaggagagaaaaagtatgaataggaagaaagtaacggctcttggattgaccgcattaatggcagtttccatggctgcacctgcaatggtacacgctgaggatgccaaaggatctgtgtattatttgaattttaaaccagagcaggcagatgactgggttgcactggcagaaaaatacacagaagagactggtgtggaagtaaacgtagtaaccgcagcttccggaacttatgaatccacattgaaatcagagatggcaaaggacgaggttcccaccctgttccaggtgaacggcccggtaggtcttgcatcctggaaggattactgctatgacctgaaagattctgagatatacaaaaacctcaccagcgacgagttcgcattaaaggatgaaagcggagcggtatccggtgttgcttatgtgattgagacttatggtattatttacaacaaagcccttttaaatcagtactgtgaaatggatggggctgtggtaagctcaccagaagagatcaacaattttgaaaccttaaaagcagtggcagacgatattcaggccaagaaagatgatctgggcgttctgggcgcattcagctctgcgggatttgatgcctcctctgactggagattcaagacacatctggctaacctgcctatctattatgagtacaaagaagacgggatcacctccacagatgccattaagggcacttacttagacaattttaagaatatttttgatttatacatcacggattccacctgtgaggcttctctgctctccagcaagaccatggaggactccacttctgaatttgcactgggagaagctgttttctatcagaacggcacctgggcatacggagatatcaaggacaacgatgttgcagacgaagatttaggaatgcttcccatctacattggtgcagagggagaagagaaccagggcctgtgtacaggcagtgagaactactggtgcgtgaacagcaaagcagccgaagaagatattcaggctactttggacttcctgaactgggtgatcaccagtgatgagggaagaaccgcattgtccaccgatatgggctttgtgacaccatttaccacctttgatgaaaacttccagtctgacaatcctctggtggcagcctccaatgaatacattgaagcaggcaagacaccggtagcctggaactttaccacaatgccttccgaagagtggaagaatcaggttggaagcgcccttctggaatatgcacagggaaccggagaatgggacgctgtaaagaccgcatttgtagatggatgggcaacggagtatgctgcagcacatgcagaataagtgctgggagcagggaacgcaaaaaagctggaaattcacttatctaaaagtgcagcagtccaaagcgttcttgacacaaagtgaatagtattagataggggtgggccccagtcgcctgccccttttttgagaactggagggagaatagatggagaaagccataaaaaaatattttccagtttttgtacttcccaccctgatcgcttttaccattggatttatcgtgccgtttatcatgggggtatatttatccttctgtaaatttaccacggttactgatgcaagatttgtgggacttgtaaactatgcaaaaatctggacagacaatacctttacccatgctctgtggtatacggcagcctttaccattgtgtcagtggtcctgatcaatgtcctggcctttgctgtggcactgttgcttaccagagggatcttcggaacgaattttttccgtaccgtgttctttatgcccaacctgatcggagggattatcctggggtatgtatggcagatcctgctcaacggcattctgcttcattttcagagaacccttacctattcctccacctatggtttctggggacttgtgatcctcatgtgctggcagcagattggatatatgatgatcatttacattgcaggcattcagaatgtgccgggagagctcattgaggcagctaagattgacggggccagctccagacagattctttttaaggtgaccctgcccatggtgatgccttccatcaccatctgtaccttcctgacactgactaactcctttaagctctttgaccagaacctggctttgacaaacggagaaccctccaacatgtcagaaatgctggccctgaacatttttaacactttctacagccgcagcggatgggaaggcgtggggcaggccaaggcagtggttttcttcctgctggtggccgtgatcgcagtgatccagaaccggatcacaagaagtaaggaggtgcagcagtaatgaccaagaaaatgaagcatgggggaatggtcagtgtgttgtttttcataatctccctggcctatctgttcccaattgtgctggtgctgatcaactcctttaagaaaaaggcttatattagcagaaagccctttgccattcccacagacaaaatgtttgtgcagtttcagaactatgtgaacggagttgagaagaccgggtattttaaagcgtttggatggagtctgtatattaccattgtatccgtatttgtcattgtgttgtgcacctccatgtgtgcatggtttatcagccgggtcaccaaccatatgacaaagggaatctattatttgtgtctgttttccatggtggttcccttccagatggtcatgttcactctgtctaagatcgcaaatatgctgaagatgacaagtcctttcaccctgcctattatctatctggggtacggggctggtctggcggtctttatgttctgtggctttgtaaaatccataccactggaaatcgaggaggcggccatgattgatggctgtacacccattcagaccttttttaaggtggtgcttccagtcatgaagcctacctgtgtgacagtggctattctggaaaccatgtggatctggaacgactatcttcttccctatctggttctggatatccggaaatacaaaaccattcccattgccatccagtatctgagaggaggctacggggccattgacatgggggccatgatgggggttctggtactctccattatcccgatcattgtattttatctggcctgccagaaatacatcatcgagggtgtgatcgccggtgcagtgaaaggctgagttttccaaaggaccatctttcctttacagccccgggatggtaaaatagggacagtaaaggatgtgaatgtatgagtgtgattttgatcgtagatgatgagaaaattgagcgggaaggaatcaaataccttctggcattggaaaagaaacattatgaaattttagaagccccaaatggggagaaggccctggctgttctggaggaacagccggtggacctgctgttcacagatattaaaatgccccgtatggacggcctggagttatccaaacgggccagggcgtcttatccggacctgcccattgtgatcttcagtggatacaatgacttcagctttgcccaggaggccctgcggtatggggttacggattatgtgctcaagcctgtggatccggagcagttccataaagtggtggaaaaggtggaggcccaggtgtctcaaaactctgccagggttaaacgccagcaaaaggagcagagcttccttgcccagtattttcttcagaactatctgtacagcgcaaaccaggagattttggagaaagccagggagctggtggacctggaaagctggaaccagtggagaagggcagtgatcgtggaggccaaccaggatttctttgacaccggggaggaggatctcccccaggaaattcacaaagagctgcgcaggccctttttttatctgaatctgaatgcccgccagtctctgttgttttttaatgatgtgtattgtgactatatgctcatcgcaaagcatatctatgtgtttttgaagcagaactattcttccagcttttatctgggagtgagtgcccagtttgaagggtacaaggagctgcccctggtactagagcagttagaacagcttatggaggaaaagttctatcatcctgagcagcacattttttcccaggaggatgagaatctgacccagagaaatgatgagaagcaggattcccaggtaatgcagaagatttctgaggatatcagccggaaagatgtggaccagttgtggaagcatttccggattcttgtggataagtacagagacaatcagaaatattcttccatgtatattaagttcgtattttccagtgtgatccaggagctctgccaggaggaccagttttccggggaaaagcgtctggagcgggaggtggagcgtctctatcactgcaaaagcatgaacgagatccttcaggtgacagaggaaaacatccgaagctatgaggaatttctgggccgctccatggcagagtccagggaagaggtggccgcagtaaaaaattatatctatcagcactacggggaggacctggggattgagatgctggcggaaaaggtatatctgtcctccggttatctcagctatattttcaaaaaagagacagggatgaacctgaaccggtttatccgggttttccgaatggagaaagccaaggagcttctatgcactacaaataagaaagtggtgcagatcagtgaggcagtaggctttgccaacgtgtcctattttatccggagcttccgggaatattacggcaacactccggaatcctaccggaaaggaacgggtgaccatgaagagagtccttcgtagaatcaaagatatgaaataccgccataagctgacgatccttcttgtgaccgccagcttagttcctatggtgatccttgttttatacaacaatcaccagatgcgggaaatgctgcggaaaaatgagatggaggatcttcattttatgctggagcagtccagggagagtgtggagagccaggtgcagatttaccgggggcttctggattatctggccttcagcccggaccttcaggaggtcattgaggactctggattgaacagttaccagacctatgagaaatatacggacgtggtggatcctctgctgtccattcccaaatcctaccacacagagattaaccaggtggtactctatgcccagagcattccagtacgtcacggctacaccctggctcccttgaaaaagatggaggaggaatggtggagccaatacctgggggaaaaggagcgggtccagtggatcgtggacaaggataaaggagaaatcgccgctgtgcgcaggatcaatgattacaatgagctcagtgctgtcctgtgtgtcactctggactacgagaaatttctccagccctttagaaacgtggtgtcggaaaactccggcggggctatcatcgatgctgggggaagagtgatcttctcccacgagaacattgccgcacaatacagagggaagggctcagaaaagtctttgctggacaccatccgcagggattacgcctatgtgagcagccagatggattccactgggtggaatttctatttatataagcctcagaaggtgatctccagaagtgtgtccaggcttcttatggatgaggtgcccttgatctttttggtagtggttattgtgggctttattggctttggtttttccaggattttcacaagaagaattgagcagctcacaaaaaatatggaccaggtgaaccatggaagccgggaggtgactgtgaccagtgactccaacgatgagattggcattatgatccgcagcttccgtcacatgatggcagagatcaatcgtctcatcaaagaggtgtatgaaaataagatcgccctgaaggagtttgagatgaaagctctccaggctcagatcaatccccattttctttataactccctttctattattaactggatggctatccggggaaacaaccccaaaatcagcaaggttaccctgtctctgagcaccttttacagaacagcgctgagcagaggggaggatatggtcacggtggagtcttgtgtgaaaaatattgaggcgtatttagagattcagctggtgatgcacgatcatgattttcaggtgcgctgggatacggaccaggaagtgaagcaggaaaaggttcccaagctgatcctgcagcctgtggtggaaaatgccctggagcatggactggatcccaaggaggagggagagaaaattctctggattcaggtggcccaggatgaaagggatgtgatttttacagtgcgggacaatggtgagggaatggaaccagacaaggtggaacagctcatcacctaccagactgcaggctacggcctgaaaaatgttaatgacaggatttgtcttctctatggagaagagtaccggattcaggtgaacagtacccttgggctgggaaccagtgtccggatcagaatacccaaggaagggacagcacatgaaaagaaggaccattctatttacagcgattctgtgtagtactttgtttctttcctgcgggaaggcccggcaggaccaggagccttccggggaggaagcagccctggaaggagccatgaccgcccaggaggaaaaggaagcctgggagactgcctcacacaccccatatggaaaatatcccagactggtcacttacacactggggcagatgagcggagagaataattccaacctgccccaggggcagacctatgaggacaatgcctatacacggtatcttctgaatatgctccagattcagaacaaggatatttacatggaagcagaggagcggtatgaccaatacgtgcaggtgatcgcaaaggatggaaatctgccggacgtgctggtggtttcagacagggagactctccaggagctggtagagcatgatatggtggaggatctcaccgctgcctatgaggagtgtaccacaaccaggatcaaggccatgtatgagagctactcgggtaatcttttaaaggcaggaacctttgatggaaagctcatggccatgcctgaaacagtcattgaccatggtccttgcctgctgtggctgcgcagagactggatggaacagttagggctgcgggaaccgaagaccatggatcaggcggtggaaatcatccgaagatttgtagaggagaaaatgggctgtgaggatggggaggaacccattggcctgatcagcgaccccacactggtgggcagcaccagcagcaactattctgtggatcccattttctcaaaattttctgcccatccccagagatgggtgagggatgaccagggggaaattgtgtatggctcccttacccaggagaccaaggaagcagtggcttttctgagaagtctgtatgagcaggggattttagagccgcagtttgcattaaggcagcagaacaatctgcgggagctggtcattgatggacgatgcggagccttcttcggactgtggtggagccccaacaaccctctgatggaggcttatgagaaggaccctgagtgcgactggcagccctattaccttactgtggactctgacagggaccgggaggtgcaggtgtcctttcccaacagcaaatatgtggtggtgagaaagggttatgagcatccagagatcatcatgaaaattttgagcgtgctttttgactataccaggtatgaagccctggatgcccaggaggtaaatgaatattttgctctaaatgtggaccccacggccaggccgctggtgatcaatgtggattacaatgaggccacctaccgggtgacgaaagaaatccgctccgtgctggagggagagaaggaagaagaggagatcagcgccattgcccgctcctattatgacgcctgcaagcggtacaaggaaaatgagaaggaggcctccccggaggactgggcggcctatacctccagactgtctgcagtgggcctgttggtggacgcggggtatgagccgccggattaccaggttctgtccggggtggacggaaccattccagacagactactgactttggagaaaaacgcatttttacagatgatcatgggggagaagcccatggaatatttcgacacctttgtggaggaatggtaccagcaggggggcagggcgcttacggagacgatccgcagggcagatgaaaaagaataaaaggcttgggagcagagcaggccttcagagctgaggaagatgtatttgattacctaacgcaagagaaatggaaaagaacgaggagataagaaaaatgaatgtacaaagtgatcgaagaggtattttgactgtggcagcctcctatttggcctggggtgtgcttccggtcttttggaatttgctccatgaggtaaattctctgtatatcctgtgctccaggattatatggtctctggttttctgcaccatttatctgtgtgtgagaagagagtggaaaaaggtaaaagctgtgttccgttcaaaaaagcagcttctgttgtgcctgagtgccggggtgatcatctgtatcaactgggggagttatatatgggctgtgaataacgggagaatattggacagcagctttggctattatttgaatcccattatcagcgtgatttttggggcctttattttcaaggaacgtctgtctaaggctcagtggttcgcctgtggcctgtcctttgcaggcgtgctgtggtctatgctcatggccaggacggtgcctgtgctggcgctggtcattggagggagctttgcctgttacggcgttatcaagaaatttctcaccctggacagcgagatttccttattcatggaaactctgatgacagcacccattgcccttgtggtgggaatctggctggagctgggaggaaaaggctttgtgggtgtgctggaggggcctcagatgcttctgcttccccttaccggcgtgatcacggcggttcctcttcttctgtttgcttatggagtaaaaagaattccttactatctaacaggcatgcttatgtatctcaatcccaccatgcagtttatcatgggaattttgctctaccatgaaaaaatctccctccagagctggatcacctttggatttatctggatcggggtattacttatgatattcaattcccgccctgcgcctgaacgaaagttttctggaaaactcggttgatccagggggtaagaagcagaaagcacaggtttgacttcaaatgctcaggttgtggaactggtaaaaaataagaaatgaggattaaaagggagccggtgactaaaaatatagttgccggctcccttgcgctacaatattgcactataatacctattagctttttatacttttttattagttttattgtttttttcggtagttccccggatgtacgccgtgttttatggtataaataatttaaatcatttatccggagggacgttatgaaaaattattataatatcaaggattttggggcagtaggcgacggacagcacaatgaccagtcagcgatccagcaggcaattgatgaatgccataaaaatggcggcggccgtgtgctgcttttggggggagtattccggtcaggaaccctctgtctgaaaacaaatgtatggctggagatagacggctctgccaggctggaggcatacggggatattgcctgctatgggacggatactcattataaccgttaccgcaacgagcacgatcttgaccggtgctggatctatgcggaggatgcggaaaatatagggatcatgggaaatgggatcatagacgggagggcagagctgtttcccaacgagggcagtatttaccggccgatgatgttccgtttcctgcggtgcagaaatatacatatctcggatatcaggctgtacaatgcggcgtcatggactacggcctttctggacagcgcatatatctgggtgcgcgcagtggatatcaggaatgaaaaaagatataatggagacggtctggattttgacgggtgcagccatgtatatgtttcagactgcaatatccggggaacagatgacaatctgtgtctgcaggcgggcaatcctgcatacccagtggaggatattcatattacaaactgctcattttcttctatctgcggcgccatccgcatagggcttaagtcaatcggtaccatatccaatgtggtgatcagtaattgtaccatgcacaatgtgtggcgggaaggaattaaaattgaatgtacggagggcggacgtatttcggatatcgccgtgtccaacgtcaccatgaaaaatgtttccaggccggtctttgtgatcctgaacaaccgttttgctccagaggatctggggaattcggtggagctgatggagatgccggaaatcggagaattgagaaacctgattttccagtctgtgatcataacggatgaggatgagatgaggcaggtgcataaaaggtttgacaatgatctgatgggctccccggcttttcatggcatacgctttgatgcagagaagaaacatcccattgaaaatgtgataatcaggggaatgtattatacaggtgtaggcggagtaatgaagagccagattccggaaacatatccggaggttctggatggaaagaaatatccggaagcgcttttgtccgggaattattaccctgactggagcagggcctcgttcatggatctgcgtaatgtgaagcatttgatcctggaggatgtggtggtcgaactgctggagcgagacgagagggaacctgtgatcctggaacattgtgatctgctgaaggcagcaggagtttataatctatcaaaggaataggcaacaggaaggcttataataaaggggtgaggcgaagggatgcagatgaaaaaaagctttcggagacagctgatgcaggtggtgctgctgtcaacagtggggatatctaccattgtcattttatttgccacagccaattatacgattacatacatcaggaaagaacaacagatggccagaaagcaggaggagattatccggaatgcgctggaacaggagttggaatccttgtatcagctgggaagaatgatgaaaaatgacggaacgatccagcagtatatggaggatgagccagcgctccttgacggaagttttctgaatgatgtatccatgtcgctgattaactataagaagctgaatcccaatatcagatatctttctttgctgcgatattcggatgagagtattcgttatgttgggagctcatggcgcgttgaccgaaagacgctgtatcaggaactggcgaatgcatacaaccaggcggaagatacaaaaagcggtcaggagcgggtctgtgtggatcaggatgtgtttggcagggaagagcatgtattaaacctgtttttcccggtgtataacacgtattcggtctatcggcagatgggggtgatctgcgtagggattcccgaggcggtagtgcgggagtattattccggaaatttttttgacagtgttctgcttgccaaccaagagggaattattcagtcccatcagcagcccaagcggattggccagacatatgaaaaagccggtcttctggatttgaattcggaaatctgttacgaaggcgggcggtattatctgactttggcgattgactcctgccagtggacgcttattgcagagatctcaatactgagaattttgaagaacgcagttggtgtactcttgatttctgtgcttgtgatgtgccttatgtgcacaagtctcatgctatactgttatagggcggcccagaagctgattcatccagtggaagatctgaaggcccggatggcgtccgtggccaggggagatatgaccatccggatggatgtggagtatcaggaagaagagtttaacgagatggccagaagctttaatgtgatggtgagaaatgtggatcagctcatggagcggattaaggaggagcagctgcaacttcagaaaattaagctgagtgcccttcaggaacagattaaacctcattttttgtataacacactggaatgtattcatatgcaggctgtcattgacggaaatgaagaaatctcccgtctcgtgctggcgttggcgtctttttaccggctttgtcttggcaaagggcaggatgtagtatccctgaaacaggaattgtcccatattgaaaattatctgatcatacagaatgtccgatatcaaaatattatccgtttccacaaggatattccggaacaatatgaaaaaatcccgattttgaagatgacccttcagcctctcattgagaactgtatttatcatgggatcaaggtaaaggagggaagaaccggagatatttttctcacgatcaggaaggacggcggtgatgcggtgctgtgcgtagcggataacggagaagggatgacacaggagcggctggatcagttaaatgagagcatacagacctttgacgagcacaatgggtatggtgtcagaaatgtgaaccgcaggctcaagatcttttttggatcccattacggtcttacatacagaaaaaaccacggacagggaatcacggtggaaatccggattccattttcctgttagaacaagagggagggcagggaaaatgtataaggtattgattgtggatgatgaggatatcatccgcagggggcttcaggtaattattgactggaaaaaattgggggtggatgagatttttacagccgcttctggcgagcaggcggcggagcttcttgaaaaagtccccgtagattttatgctgacggatatctgcatggtgaatatgagcggtctggaactcattgaaaaggtgaaccagagccatacggatatgagaatcgtggttctgacgggatatgacagctttgagtatgcccggcagtgctgcaggatggaggtccatgatttcctgctcaagcctattgatcgggagagcctggaagctgccgtaaagaagcagtttgagattcttcgaaagggaagggaagaaaagagccgaaaacagatcgagtaccgtgccgaaggcctggcggagcaataccgtcaggaaaaattctgccgtggactggtggaagggacgatggatcaggaggaagtgaatattgtctgtgcccggtatcatcagaatcctgatgaagcagtgcaggccatcgtgctgcttcccgtgctggaacaggagcggtcgtggaaagcggagcatgagtaccaatatctgcttgccaaaaatatttgtatcggcttgtatgatgtatccaggcagggactgacctttgaggattccctgggacggatcgtggtagggatgttctgcggggagcagtacgatgaagtggaagagagggtacgtgcactgaaaaccattctttatgaagagacgggatgttccatgaatattctgatcggaaacagggtggagggcctgcagtatctgagggcttcctatgaggatgcagtatctattattccccagatcaaagagaaacattctgccatctatttcactcccaaatcggagttgcggcttaagattttcagggagactgtggcagagctgcaaagaatcatggaggaaaaaattgatgatcttcaggtgctccttaaaacgtatgatacgtatatctgctgtacaaagtcatacaatctgagcgagtctatgatgcgccgcacgctgtaccgtctgctgtctgcactgtattacgagtaccgtattgacagaggggagaaagaaaataattatatcaaccagctgatcgacagtctgacaaaatgcaataatgaggaaatggcaatcgtcgggagggaatgtattctatatcttttcaaccgggagaaagagaatgtccatgatgttgtccgtactgcaaaggagtatatcaagaagcatttgtcagaggagctctcccttgatatcctggcgaagcagtcctttatttctccggtgtatttttccagattatttaagcaagagaccggagagggagtcagcgaatatattgtcagaaagcgcatggaacaggccaaaagcctgcttgcatctaccatgctgcgcagtggtgaaattgcgtataaatcaggttacagggatgtgaattatttctcggcggctttcaaaaagaacgtgggaatgtctcccagagagtacagggacagcgtgcgaaaaggtaaaggaatctaagattgaagtatagatattctatattgtttcgccaatgttcatggtatccttgcactatcaaaaacatacgggaggaaaaccaaatgaaaagaaaatcgttaagtgttttattatgtacagcaatgatgctggggaccatggcaggcagtgtacagactgtggctgcacaggaggatcaggaaaggaccatgacgttcctgcactggagaacggaggacaaggcggcttttgaggagctggctgcgcagtatgaggagatgaatccgggacttcatattgagattgaaatcgttccgtcagaggattatgcaaagacattgatcatgcgtgcacagggcggggaggcaagcgatgtttttgcagtaaacccagatggagatttcggctcagaaatcgcaacgggagcactgatggaactcaatgactgcgaagccattcttgacaattttacggaggacgcactgggagcaggaaccagggacggcaaaatctatgcggtagtccagaccacgaacccgctggcaatctattacaacaaggatattttcagtgaatacaatctggaggttcccactacagtagaggaatttatgagcgtgtgcgagaccctgaaggaaaatgatattgtacccatggcacagggagcaggagaatcgtggatgccggagttcattattgagggaatccttgccaacagcatggaggataccagcctgtttgccactggcaatttgatggaggatccaggctttgtggaagcagtgcaggcagcaaaggatatttatgataacggttatatcatggaaggcagttccggtatttcggaggagtcgctgctcacaggttttgcggttggaaattatgcaatgatcgcaacgggtacatggtctatgtcaacgatccgggatattgatgacacgattgactttggcgttttcaatatgcctggctccaagggcacgacaaaaggtgtttcaaatactggactgatgcttggtattaataaggattcagaggtgatggaggacgcaattggatttgtagattatctgacttccccagagccgcttacttatttcgcaaacaagacagggcagcttaccgttgccaaggatattgcaattgagtcagaggacctgaagatggctcagcagctgctctccgtcccggacggcattgtgtccgcaccgtttcaccagaccaatgcagagggcttggatgtgtgtatgctgcgctcagtagcgctggtcattcagaatgtgggtgatgcccaagaatttgcacaggcatgggcggacgagcttagcaaggcattgaatgagtaactgggaaaaacaggtggcgcagaggattgcgtcacctcttttaaaaagcaaaggagttgtagtatggaaaaaaaataccgaaaaagggagatgcagtatcttctgtttgttcttccggcctttcttatttttatgatcttcttttttattccggttattcagacatttggatatagtgtgacgaaccggaagatgataccagagaacacacagtttgtggggctgcaaaattttgtccggctttttaccgacacgccggaattctatatcgcactgaaaaataacttgttttttaccgttgtcgtcacggtgctgcaaagcctgatcgcttttattttggcccttgcccttgactgtaagcttaagggtaaaaatctgttccggacttatttttttgcgcctgtggtgatcagttctgtggcagtcagcctggtctgggcttttatgtatgatccgaatacaggcgtgctcaattctctgtttgacagcctggggcttgggtttctccggcagaattggcttggggacgaccgggttgccatgttctccattgctcttgtgcagatttggcagtgggtggggtttgaaatggttatattcatggctggcctgaataacattcccagagactactatgaggttgcggaggtatcgggggcaacttatttccagacacttttcaagatcattatcccatctctgaagccgacgattctcacggcatgtgtgctgacgacggtggggtgcttcaaggtatttgatctgatctatattatgacatcaggcgggccggttcacgcaacagaggtaattgccaagctgatttatgattatgccttttcctacggaaagatggggctggcatccgctctttcagttattttgctgattgtaattatgcttgttggatttgggcagatgtatatgctaagggataaggagtagagttatggaaagaataaatctaaaagaaaaactgatacgctatgtcattgtggttttctttgcagtaatctggatcattccgctctatatggcagttgtgacaccgtttaagtccattaaggaaatcttccgtacagttctggcattaccgcagacatggaagctggacagctttttaaaggtttttcaagaggtggacatctggcactatttgaaaaattcgtttgtcatcacgggcgggtctgttgtgattctcggtattttttcttcgctggccacgtatgccatggtgagaagcggcagcaaactcataaagggttcgtatctgctatttagtctggggctgatgatccctacacagtctggaatgatcgcattgtttaataccatgcagtcccttcacctgtataataccactgccggcatgatcctggcatatgtggggtgttcgctgccggtctcggtatttctgtactatggatttctgaaatcaattccctatgagattatagagtccgcatatatagatggatgctcggagtggagaatctatacgaaaatggtcctgccgctgagtacctctgcgtttggtacggtagtaatttataatgcagtaaatatatggaaggatttcacatatccgctgctgtttactcagggagagaagattaagacgcttccgattgcaatttatgccatgaaagggcagtacgtgtccgattatcccacaatgtttgcaggaattctgatcgctacgctgccgctgttgattatatatatcgctttgcagaagcagtttattgcaggcgtaacggcgggagcagtgaaaggataggcgcgtccagaaaaagggcggatagtttggcgggtggaacacccgcacggcaaggtgtagcgagccaccgttagcgagtcttgagtgttgtctggtaacaggcagggctaagcgtagacagttaggaaacagggttgcaatgctatagagcttcgaaattttacaaagcttcaaaggccgacgcagttcatccatgcggaaggcagcatcacagcaagcgataagcgagtttgctgtggctttggcggagtcagagggccaatcatgtttcacaatgaccaatcagtcaactggagagagcttgcggtctcttgtatgtatttacaagtatgacgtacaacgatgacaaggaggaaatcaaatggaccgcaggcagtcggatattcccatactaccaaggaaaccgctaatcacggtggagggaaggggaatacataataacactttttctgaggacacatttgccgtactcagggacgggagaacaaatggaaacgaaattagaaagaatagcagacaagtcggctcatgaagtccgaccgatatttacctccctataccacttgctgaacgaggaattattacttgaatgccataaggaactagacggcaggaaggcagtgggagtggatgaagttacgaaagaggaatatagctcaaacttaagcgaaaacatcagaaacctggtgcaccgacttaagaataaagcttataagccgaaaccgatgctgcaggtatacattcccaaagcaaacggaaagaagcggcctctgggattagcatcttatgaggataagatagtgcaactgggattgaagaagatactggaagctgtgtatgaaccaaagtttgcggaaaacatgtatgggtttcgtccgaaacttgtggaatactacattaaagacccaaacatcctgtggttagtcaggaaatatctaaaagcaggtattctggaggcagggagctatcaaacaaatgaggttggtactgcacaggggaatatcatcagaccggtgctggcaaatatctaaatgcatcatgtactggtgctctggtataaagcttattacgaaaagcggggaaaaggaatgagtttcctggtggtctatgcggatgattatctggcaggatttgaacataagtgggaagcggagcagtattacaaagagatgcagatccgactaaataaatacgcactggagctagaaacgacaaagagcagacttctggaattcgggcgatatgcgaaagaaagaaggaagcggagaggtgaggggaaacccgagacctttgacttcttaggatttacattctattgcggtgaaaaccaggcagggaagttttgcgtgaaacccagaacaaacgggaaacgctttcgaacgaagctgaaagaaatgaagaactggctgaaatacaaccggacagtaccgatacgggagataatggcgacgctcaaccgaaaattgattgggcactaccgctattacggcctaacctataatatcccgatgctatgtaagtttcattacgaagtaacaaaactgctatttcgctggatgaaccgcagaagtcagaagaaaagctacaactgggaaggcttcaagcagatgctggagtactatccactggcgtatccaaagagatattataatctatacgcgtagcatgaaactgtgaatgttattatgaagagccgtatgcgggaaagccgcacgtacggttctggagaggagtacacattgcgaaatgtgtgtttactaaacatgcagcttacagcgagcataatggtgtgaatgtgaaaggataacaggggcggtagtttgaaaatgtccccaaataagtgaaacattagccccggtttttgctggggctttttaaaatttaattttttcaacagctttttgatgcgcttttgtatggtacagattacctttggggaaagagagttatttagcttttagtatctttaaaacaaaaaagcgaagattgtgagggggggggggttaagtaattcagtataatgggaaaagctggttatagtgagtatatcctttctgataatgaaatcttcctgttgtaaatgcataggcaggaatcagtatattatagttgggacattttctattaagattttaggagattatcaggaatggtttataaaaaggtcgacagtcaattgaaaatgtaaaaaaatgtaaaaaaggtattgacaggagggccatacagtggtattctaatctggctgtcgcaaagacagcaccttccatccgacaaagttactaaaaatacttcaaaaaagttgttgacaagtaacaaaggatatggtaaagtaaggtagttgccgctgagagacatccggcaggcatcgacaaaaaactttgaaaaaagttaaaaaagttcttgacaaacagaaaacagcgtgataaaatatcaaagctgtctgaaacaagaacagcagacaaccttgataactgaacagtgaaacacatacgattctcgaaaattctttaagaagatttcaaaaagaacaaattcgaaccaaacagtaatgaggattctaggatagctaacgttatcttgagaaatcaaactttatcagagagtttgatcctggctcaggatgaacgctggcggcgtgcttaacacatgcaagtcgaacggagatcagtttgacagagacttcggttgaagccgatctgatcttagtggcggacgggtgagtaacgcgtggggaacctgccctgtaccgggggataacacttagaaataggtgctaataccgcataagcgcacagcttcgcatggagcagtgtgaaaaactccggtggtacaggatggacccgcgtcagattaggtagttggtaaggtaacggcttaccaagccgacgatctgtagccggcctgagagggtgaacggccacattgggactgagacacggcccaaactcctacgggaggcagcagtggggaatattgcacaatgggggaaaccctgatgcagcgacgccgcgtgaaggaagaagtatctcggtatgtaaacttctatcagcagggaagaaagtgacggtacctgactaagaagccccggctaactacgtgccagcagccgcggtaatacgtagggggcaagcgttatccggatttactgggtgtaaagggagcgtagacggcggcgtaagtctgatgtgaaaggctggggctcaaccccgggactgcattggaaactacgtagctggagtgccggagaggtaagcggaattcctagtgtagcggtgaaatgcgtagatattaggaggaacaccagtggcgaaggcggcttactggacggtaactgacgttgaggctcgaaagcgtggggagcaaacaggattagataccctggtagtccacgccgtaaacgatgaatactaggtgtcgggtggcaaagccattcggtgccgcagcaaacgcaataagtattccacctggggagtacgttcgcaagaatgaaactcaaaggaattgacggggacccgcacaagcggtggagcatgtggtttaattcgaagcaacgcgaagaaccttaccaagtcttgacatccccctgacgtgtccgtaacggggcatttccctcgggacaggggagacaggtggtgcatggttgtcgtcagctcgtgtcgtgagatgttgggttaagtcccgcaacgagcgcaacccctatccttagtagccagcagtgagatgggaactctagggagactgccagggataacctggaggaaggcggggatgacgtcaaatcatcatgccccttatgatttgggctacacacgtgctacaatggcgtaaacaaagggaagcagccctgtgaaggtgagcaaatcccaaaaataacgtctcagttcggactgcagtctgcaactcgactgcacgaagctggaatcgctagtaatcgcggatcagaatgccgcggtgaatacgttcccgggtcttgtacacaccgcccgtcacaccatgggagtcagtaacgcccgaagtcagtgacccaaccgtcaaggagggagctgccgaaggcgggaccgataactggggtgaagtcgtaacaaggtagccgtatcggaaggtgcggctggatcacctcctttctaaggaagaagaagtagagtgttggagtgtttcactgttgagttatcaaatgtaagtgcgcctcggaagagaggaaaggcttacttagttaacgaaatatttctggtgccgatgcgtctgggggagacacccgttcccatcccgaacacgacggttaagacccggacggccgatggtactgcactggagacggtgtgggagagcaggtgggcgccagatcaaaaaagaaaaaaacaggtagaacctgatgagatagaacaggcagaaggaagttccgcgcagcggaacggctttcacactagacgcggcagtgccttgtcaagtgtttaatgccaacctccatcagcgggggagcgctgttacaataactggtcttaccagtgatcagagttcataaggaagacttgtggatcctgatgactgataaacatcagtcaatcctgtaccttgaaaactgcatacatgtaaaaaatctattctaaacgaatagatatccttgaaaaagagcatctggaagttattgaaagataacaaaaggatgcaaacgcaagataggaagacatcgaagacgaatctgcgagagcggaggagtcaaagatacaaaaaaatcagagaacgaaccgtatgttcctaacgctataggaacatagcaaaggtcaagcaataagggcacagggcggatgccttggcactaagagccgatgaaagacgtgataagctgcgaaaagcttcggggaggagcaaatatcccgtgatccggagatgtctgaatggggaaacccgtctgagaaaacctcagacatccatacgccaatccataacgtatggaagggaacccggggaactgaaacatctaagtacccggaggaaaagaaagaaaactcgattcccagagtagcggcgagcgaaatgggaggagcctaaaccggcgtgcgtgcatgccggggttacggactgcgattaagatccaggaaggttaacggaacggttttgggaaagccggccagagagggtgaaagccccgtacgtgaaaaccagagaggctgagcaggatccagagtaccacgagacacgtggaaccttgtgggaaatcagggggaccaccccctaaggctaaatactacttagtgaccgatagcgcatagtactgtgaaggaaaggtgaaaaggaccccgggaggggagtgaaagagaacctgaaaccctgtgtctacaagctgtggaacaccgttaagggtggaccgcgtactttttgtagaacggtccggcgagttacgcttactggcaaggttaagtccttaagggacggagccgtagggaaaccaagtctgaacagggccagagtcagtaagagtagacccgaaaccgggtgatctatccatgtccaggctgaagccgccgtaaaaggcgatggagggccgaacccacatccgttgaaaagggtggggatgaggtgtggataggggagaaattccaatcgaacccggagatagctggttctcctcgaaatagctttagggctagcctcggcagagattaacggaggtagagcactgaatttcctagggggcgtcaaagcctaccgaagaatatcaaactccgaatgccgtataatcgattgccgggagtcagactgcacgagataagttgggcagtcaaaagggaaagagcccagacctccagctaaggtccccaagtgcgtgttaagtggaaaaggatgtgggatctcccagacaaccaggatgttggctcagaagcagccatgcattcaaagagtgcgtaatagctcactggtcgagaggtcctgcgccgaaaatgtccggggctgaaacacgacaccgaagctgaggaatcagagatgattggtagaggagcattgcatgcggagagaagcagtaccgtgaggagctgtggactgcatggaagagagaatgccggaatgagtagcgagatagaggtgggaatcctctaggccgaatatccaaggtttccagagtaaagctgatctgctctgggtaagtcggggcctaaggcgagggcgtgagccgtagccgatggacaacaggtggagattcctgtactgcggtatgacagaactgtggggacacgtaaggagagcggaagccgggagtggaaagcccggcccaagcggggtaccagatgcaaaggaaaatccgtgtatcaatgggaagccgtgacggggagcgaaataaagtagcgaagaccgtgagccatgcgtcaagaaaagccgctatcgttcataccgtacccgtaccgtaaaccgacacaggtggatgaggagagaatcctaaggccggcggaagaagcattgtcaaggaactcggcaaaatgaccccgtaacttcgggagaaggggtgcctgggaaaccaggccgcagagaataggctcaagcaactgtttagcaaaaacacaggtctatgcgaaaccgaaaggtgaggtatatgggctgacgcctgcccggtgctggaaggttaaggggagaggttagcgcaagcgaagctttgaacttaagccccagtaaacggcggccgtaactataacggtcctaaggtagcgaaattccttgtcgggtaagttccgacccgcacgaaaggcgtaatgatttgagcgctgtctcgacaatgcatccggtgaaattgaagtaccagtgaagatgctggttacccgcgccaggacggaaagaccccatggagctttactccagcttggtactgggatccggtattgcatgtacaggataggtgggaggctgagaagcggtgacgccagttgccgtggagccggtgttgggataccacccttgcagtattgggtttctaaccagccgccgtgaaccggcggtgggacaatgccaggcggggagtttgactggggcggtcgcctccgaaagggtatcggaggcgctcaaaggttccctcagaatggacggaaaccattcggagagtgcaaaggcagaagggagcttgactgcgacaccgacgggtggagcaggtacgaaagtaggacttagtgatccggtggtattaagtgggaatgccatcgctcaacggataaaagctaccctggggataacaggcttatcactcccaagagttcacatcgacggagtggtttggcacctcgatgtcggctcatcgcatcctggggctgtagtaggtcccaagggttgggctgttcgcccattaaagcggtacgcgagctgggttcagaacgtcgtgagacagttcggtccctatccggcgtgggcgcaggatatctgagaggagctgtccttagtacgagaggaccgggatggacggaccgctggtgtaccggttagactgccaagtctacggccgggtagccaagtccggaagggataaacgctgaaggcatctaagcgtgaagcccccctcaagatgagatatcccattcttaggaagtaagaccccttgaagacgacgaggtagataggacagaggtggaagtgcagtgatgcatgtagctgactgttactaatcggtcgagggcttgaccaaaagaaaaagcccagggctagtaaccctggcgggaagttcaaagaaaaaaagcatgtatgcagttttgaaggtacagacattaagtggctcaaacggccacttatttctatacataggggattggtcaaatggtatgacaggagtctccaaaactcttagtgggagttcgattctctcatcccctgtcacaggaaccatatgtggttcaataaaaaggcaattggcttaaagggtaatatcgatagggcccctttttgagctaaagtcaagcagcgtaatgtacgagagtatattacgctgcttttcctttttagtattcctcatttttcttttactaaacttgaagctatggggttgacctaaaggtttcgccttaaggcgagggatttaaccccttatacagacattaaataaacgcaacgggcagattgtggcggatgacatgataccacgccggacagtcttttaggatagcaagcgggaatcctcggttattcaattgccgagatgaaagcgtcaaaatgtgcatttctgcacgaaacaatagtggctgtatccagcctataaaaaaagaacagacattcgacaatatattgctttgcttattgaaatagtgtatactatatgcatgaaagaaaatctgatacatgcaagaacctgcgtatataatatcaactaccatgtggtgtggccggtaaagtaccgcaggaagatcatcacagaagacatggagcagacgatgaaaaaatgggctgtggagaccgctgatgagaagggcttcacagtccatttatttgaagctggagaaagagaccatatccattgttttgtttctgcaccacctaagatctcgatctcatatattgtaaagatgctgaagggtattattggaagatatactctccaaaaatatccggaactccgtaaatatttatggaagggagaattgtgggatcattcctattatgtggaaacaataggaaacgtttcggaggaaaacatccgcagatctattgaaaaacaaacgaagtcttactgacaggaaaggggaatgcatatgctcttgtcgagaagagaagtatttttaccaacagaagaacagaagatgattttgggacatatgggatatgcagcatttaaactctggaatgtggcagattatgaaaaaaggaattacaaagagattggaatgaccagatatccggactggtatgatcagaagaaacggttaaaagaaaatttcttttataaaaatcttccatcacagacggcacaggatgtgctccaacaattggaagaggcgtggaaaagcttttttgtattgctgaggagcagaggggtggagaatccgagaccgccgcgtttccgaaaagagaagatggatattacttttttgaaagatgcaatccggcaggaagaaggaaagatccggctgaccattccaaaacagttaaaaacttatctgaagagccagggtgtggatgctgattatctttatctgaaaacaaagcggttttcagacattcatatcaaagagattcagatcaagtttgatgaaaaaagatatacagcaatagcagtatatgaagagacagatgttccgatgcaggaagataatggacattatctggggatcgacatgggactgaaaaatatgctggcctgctatgacagtgcagggaagacatttctgttaaacggattattgaatattacacattattttgataaagagattgccagatatcaggggatcagtgaccgtcagcagtcatgctgtgggatcaagtacccgaaaaaaacgaaaaaggtacgttccctatatcgaaagaagaaaaataaagttactgatcttattcataaaacaaccagatatgtggctgagtattgtcaggcagagcatatcacaacggttgtaattggagatatgaaggggatacgtaagggaaaggatcttggaaggatcaatcagcagcttcattcctttccgtatgaaaagatcctccagaaactggagtataagctgaaacggtacggaataaggatgatccggcagaaagaaaattacagcagtcagtgcagtccgaaaagtgataaagtgggaaaagcgtttgcacgaagtcagaatcgaaaatatcggggattatatatagatgagccggatatctataatgcagactgcgtgggggcatataatatcctgcgtctgtatctgcaaaaaaataaacttccgtttccggaagcggccggactgaactgtccgcagaaagtatttgtgtaagtccgaaaggactagcaatattgggcacatggactgtccgttatggcagcaccgaaggtgcggcatatagatgctcggtaattcaagtgccgagtagttcacacacagaaacaattcttgcgggatgccataaacaacatcgcttcccattcaaaaaatctggaagagtttaaaaacagattactggaaaataccatatcacccttacagaccgcaggggccgtttcagctatctccacccggaatgtaataaaaacattactgaccgggcacttggaagctacactacccattcttcaggcagccacatacgtaagaagctgaccgtgccccaaaccatgatatttcctcatagaaaaaccgggcagtatctgtttgattgatactgtccggctcattctgcattttacctaagcaactgccaaagtgcctttcggtcactgtcggaaacgctcaatacatccatagattgttccgcagaccatcccattttttccataaggttcttaatgttagcgaacagtgtagaaattctttctttctgagctgctttctgagccgcttcctcattcatttgttgtatggccaaacacacatcaatcgcctcctcaccttctttgactgctatctttgcacctacacaggcatttaacacatccacttcctctctccccaaatggtggaaagactcgtttgcatccaatacctttttcaattcatccttgtctcttgcatacttgataaatgacaacacttctttcaaagaactctggaattttccaaaatcttcatcctctatcgaagccggtgcgatcaaattgactttgtaatccggaaccagtgcaagcacccttgcatcctgcccggaaaacatttcatggattgataacggactgtaccactctttcgagtcaaaatatacaaccagtgtcaccacaggcaataaatgatcttctttcagaaagccggaaagatattcatcgctgccagcatttttataatcaccggacaatctgtgggaagctatcgcttcttccacctgcttcgcatattggagcgcatcataaaccatattttttaccggcatcgcataatgaacattcgactggttctcgattgccagaagcagatatgcggtacttttatccatcatcgcaaccacggattttatgacatcccttgttttctgtactggctggccggcacccttttccccgccataagggacatctatctcacgggtatccagttccttcaggctctccggatggatgacctgttctccgccatatataaaatagttaaacgcatccgcaaagatatcattctgtctcatatattttgttgttaccgtatcttttactcccaaaggattcaccacctttattatatgctgccgctaagcaaatatcctttcctgttacctgtatcataccatagcaactcaggttttacaagcaggaggctgtgtttcagattcccggcgtcagaatagatgttagcttcatataataataccagaaatctcccgaaatgtatggggatttctggtattatttttttattacataggaaagttcttagaactttcctatgtaataaaaaccctccgggggatgcacacaatgtgccagggaaagctgcttcgcagctgcacattgacgcacaaagctaccaagcccctcatgagtgaggggatggagagttgaagcgggcttgtccgctttgttttacatttgcgaaatattcacaatattgtgattattgagtaattgcacctggcatcctctgtctgtataattaagacagacaatgagggcacagccagcattagatcgcctgtgggggagagggattctatgaccggaggctgtgtaacgccatcatcattgtccagacaggaggctgccgtgaaaaaaatattaattgttgaagatgaccgagaattaaaccagggaatttcctatgccctgaaaaaagataagtatgagattgtgtgtgcatattctctgaaagaggcaaggtctgcctgtttcagggaagaaatagatctgattttattggatattaatctgccggacggagaaggttttgaattttgcagttgggtaaaagaaagaaaggcaattccggtagtgtttcttacggccagggatttggaggaagatgttctaaagggatatgatataggagccagtgactatatcacaaagccattttccataaaggttttgctgaaaaaggtgcatgtgcttttagacaagggagaacaaccttcgaagtcaatttttgaggacggctttctaaccgtggattttgacagagccaaggttcaggtaaacggggagctgtgccgaacaacccccacagagctgcggatgctgcgtatatttattgagaatgaggggcaggttctcacatattccgtccttttggagaaattgtgggattgtgagggcaaatatgtggacaaacatacattggcagtaaacgtaaaccggcttcggggaaaaatcgaagatcaggaccacaaatatatatcaaatatctatgggatgggctatcaatggttgaaaaaattataatcatcagtctgttgatcattctggtggtacttttgaggaaaatgtatcgtttgaagagagacatctatggactttcttttcgtttggaaaagtgtctggatgccatgctttccggagacagtatcgacgaggagctggattttcaggatagtctgtgggaaaagctctcaggaaaacttcagaaattataccaagtctggcaggaaagcagtaaaatggagttggaagaaaagaggaagatgaaggagttgatttctgacatttctcaccagacgaaaacgccaattgccaatatcaaaatgtacttggagttattagaggacgagtccgctgactttcaggacccggaaaagtttctgcctaaaatagagaaccaggtggataaactggattttctgatccaaagtctggtgaaaatgtcccgtctggagacagggataattgaaatccacaaaaagcccggcaccatctcatcaactctggggcgggccgtgtcttttgttgtgcccaaggcagaaagtaaaggcattcagcttcatatccaatgtcctgaggaaattgtggtgagccatgattccaaatggaccgaggaggcactttttaatattttggataacggagtaaaatatactcctgcaggaggcagtatccatgtgacagtggctgttcaggagatctatacacgaatcgacattaaggattcaggcagggggatcgaagcttcccgtcaaggtgaaatttttagacggttttaccgggagccggatgtacaccaacaggacggcattggggtggggctttatctggcaaggaagatcatcacccttcaaggagggtttattgaagtaagctcacaagttggcaagggagcgcttttttccacgtatctgcccaattcctgataattatccaataggtcctgctcccccttctttagctaaatgctaagaaggttttagacatgttcttctccccccatactcctgaaagaattcagaagtacgagggcttgtgcttatagataactgtatagtgcccacagagctctccaatgggttatttattgatcacatttacaggagaaccctccagaaatgcctttatattggctacagtaacatccatgatcctttgacgtgctgcctgggctgcccatgaaatgtggggagtgatcaggcagttcttcgctgtgagcagtggattgtctgcctgaattggttctgtagatactacatctaatccggcagcgtagacttttccactgttcagggcatctgccagatcctgctccacaacaagctgtccacggctgttgttgatcaggatgacaccatctttcattttttcaatattttctctgttgatgataccttctgtttccgggaataaagggcaatgcaggaaaattacatctgattgggcaaaaagagtatccagctccacatattcagccagttttttgccagaatcacagggataggcatcgtaggccaacacccgcatatcaagagcccccagaatcttggcggtggcttgtccgatgcggccaaggccgatgatacctgcagttttgccataaagctcaatcatgggataatcccagtaacaccagtctggattggtttcccatcttccttcctggaccgtctttgcatggtggccgtaatgagagcagatttccagtagaagtcccactgcatactggcccacgatctgggtaccgtaagtgggcacatttacaactgggatccctttttccttggcataagcataatcaaccacattgtatccggtagcaagcacggcgatcaacttcaggcagggacacttatcaatagtatccctggaaatgggtgttttgttcagcactacaatctgtgcatcaccaatacgtctggcaatctcaggactctcttcataggaggttcggtcatacacggtgagttctcctaactcttccagaggggcccagctcagatctccgggattttctgtataaccgtctaatacaacaatcttcatattcctgttctccaatcacatattttgattaatacaatagcatgtcaagatggcttttgaaagctctttttttcatttctctgttttggacaataatatattctgatttttgttaaaattgcatgaaattataaaataacaagtgcataattaatcacacgaaataaaagatacaaaagaaaaaaacacaaaaaaaggtatacttaaatctgagaaaataggacaaaacgtttaagaaatatggaattataaaagtaaaactatacaacatgcacaatagcataaaaacatcctatgatagcattacaacactgtatttcacgaaaaacaatcgatgtgttaggataatattacaaatcagcgttgattgctttaggattttgctgataactattgcaatatccaacaaatagaaagtgaatatttgctggttttgccatagcacagcctccttttcgcgagaggaggctgtgtaatatgagggtcagccttgaagcagacattcccggatacaataccaattattgaaacataagaaaaaaggaacgtaatcaattcaaacaggaggttttatcaatatgaaaaaggcaatatcttttattctttccgcagcagtgatgtgttcggctctggtatgccagaccgtaggggcagccagtccggaatatacaattaagattggacacagcgacaccacaacaaatctgatccatgtatccctggagaatttcgccaagtatgtaaatgaaaaatcagagggacgagtacaggttgatatctatgcatctgaacagcttggctccaatgcagagatggcacagatgatcgaacagggattcctggatgctatgatgcttccccagggacaggttgcagactattcagaaaagattaacacccttggtcttccgtttctgttcacagactatgaagcagtgtaccaggtacttgacagtgagattggtgaagagctggtggaaggtcttgctgaccacaatatgatccagctggcatattgggagaacggtcttcgtcaggtgaccaacagtaaggtggctatcaatgagccggctgatctgaagggactgaagatccgtacaccggaggattccatgaccatcgctatttttgaggcgctgggcgcttctccctctccgctggctttctcagagctgtatctggctcttcagcaggggacctatgatggacaggagaatccagttgccaatatctatgccaataatttccaggatgtacagaagtacctggcaattaccaaccataagtatgagtgtaaaaatatgatcttctccctgtcaacttggaacaatcttccggaggatgtacaggaattgctgaaggaagcagccaagatctatggtgatgagcaccgcaaggccattgttgacagtcaggaatccatgcttcaggagctggttgacgccggtatggaagtgacctatccggatacagccgcattccaggaagctaccgcttccgtttatgacgacttctacgcaaagtatgactgggcagaggatctggtagccaggattcaggaaaccacaacaaagtagtagaagcttgaagcctgagagtggcttttgataaacaaggcaacagagctgctgcagatgcgctgaattttgcagcagctcattttatgagagagtggtgataaattgaagattttagataaaatctgcggaatttttgagaaaattgcaacgtttattacagtgacactgatgatatttcttacattgttgatcacattttctgtgctgagccgctttatatttaacagtccggtggcatggcagtatgaggctacgctggtgtgcctgtcctgggtgatctttattggaatgtccatcacattctcattggatgaacatatgcggctcacctttttgtccaatgcgatcccggagaaaaaacgcaatatctggctggcagccatggatatcatcgtactgattttcctggtatggtccggctggctgagcatttccattattgaaactgccatgggaacttcctatcagaccattccggtagcccgaggtgtgttttatatgccgtatcccatcggctgctttttctcagtgttccatattgtaaatataaacttaaagcggctgaccgggcagaacaaggataagactgcacaaacagctcaggaataaggaggatatttttatggtagttcaaaatgctgtaatgctcatgggcctgttcctgggaatgatggtctgtggcgttccaatcgctttttcactttcaatggcttccatcataaccgcggttgggactggtaccttccaggcaggagccatcgtaaaccgaatgatcggcaatgccagctcctatacattgctggcaattccattttttattctggcagccaagctgatgaattcaggggggatcacaaaccggattttcagctgctgttcggaatgggtaggatggattcccggaggacttggacatgccaatgtattggcgtcggttgtattttcagggatgagcggctctgcggtggcagatgccggaggacttggacagattgaagtggatgcaatgatcaatgaaggttttgacccggaatttgccgctgcagtgacaggcgcttctgccaccatcggacccattatcccgccgtctgtgcccatggtggtgtacggtatgatgacagaggtatccatcggagccctttttatcggcggctttgtgccaggtcttctgctggctctggcaaccagtttcctcatttactttatagcgaagaaacgtaaatatccggtacataagtttagtctgcacgacgccttgcactccacgaaacgggcattgttatctctgctcaccccggtcattatcattgggggaatctggacgggcgtattcagccccacagaggcagcctgtgtggcagtggtttatgcatttatactggtggcagtgatttaccgggattttacaatgaaagaactgattattaatctgaagcagacagtggcagattccgcaggtattctggtgatcatctgcggagcggcggcattctcctggctggtgacaatgatgggaatgacgaaaactctgtcagtagccctcaccagcctgacttccaacaaatatgtgatgcttttgatcttgaacgtggcgtttctgctcatcggtatgttcatggaggcgctggcagttctgaccataaccgtgccatttttgattccgctcatgtcagccttcaatatcgaccccctgcatctgggcgtggtgcttgtattgaatctgatgatcggcttgtgtacgccgccagtgggcacttcgctgtttatctgtgccaagactgccaagatcagtattgagcagatgtacaaggcaatactgccgtttttagtacccctgctcattgtattgttcctgatcacctatgttccgggatttgttaccttcctgccaagtcttatgtgatgggaatttagattaggatttgtttttagaagttgcttttgtggcttgggcggcctgctgaagcgtgtattttccacagatcagaaaacagatcacaaggacgacggcagaggcagctgcatagaggagccgtttttccatgatactggcggcagcgctggcaatggttccgaggatcatgacagccaggcagaaccagcgccagatcttgttttccacaatctgccacaggaaagtaaggacaaagatcagagcggttatgccattaaacagggcaaaaaatggctgcttttgccactgcagggcagcgcctgccgcaaaaaccatacatggaagcaatgttgcaaggggatagattttttgaatacggctgaatttttcggttctcatcataggatcctccttatggatataggtagacggccggaaattatacccacagcgggtaccttgtaaaagtgctggaggaattatagcacagtacagattcaggtgcaaatacaaaaaaccaatgctggaataaaaaggagtaatagttatgaataaagaaattaccgccgcagaattaaaggaacaagccaagcttttgagaaaaacggctgttaccatgatatatgaagcccagtcaggccatccgggcggctctctgtccattgcggatattgtcacggatctctattaccgggaaatgagggtggatccgaaaaatccccggtgggaagacagggaccgtttcgtgctttcaaagggccatgtctgccccattttgtatgcggcgctggggcttctgggatttttcccggaggaagacctgcatacgctgcgaaaggagggctccaagcttcaggggcatccctcaatgacaaagtgtccggggattgatatctccaccggctccttaggacagggactgtcctgtgcagtgggtatggctctggccggaaaaagagacggaaaagattatatggtatatgccgtggtaggagatggtgaggcagatgaaggccagatctgggaggcagtcatgtgtgcataccgttatcacttggataatctggtggtgatcattgacaacaatgggctgcagattgacggaaccacggatgagatcatgcctcaccttgatctgaccaggaagtttgaagcctttggctatgatacctatgagattgacggacacaatatggaagagattatggagacctttgataggatcagaagccaaaaggacggcagaccgaaatttatcaatgcccacacagtgaagggcaagggtgtgtcttatatggaaaaccaggttgcatggcatggaaaagctccaaatgaggagcagtatattcaggcaatgcaagaaattgaggagggattctgaagatggagaaaaaattaatcgccacccgcaacggtctaggggatgagcttgtagccctgggggaagaaaagaaggatttgtatgtggtggatgtggatatagccaaatcctgtatgaccactgcatttgccagcgcatatcccatgcagcatgtaaatgtgggaatcgctgagcaaaatgcggcaggtctggcagcaggcctggccacctgcaaaaaggtgccatttgttgtcacctatgcggttttcggctctatgcgtatgtgtgagcagatccgtcaggagatctgctaccctgggctgaatgtgaaaattgcctgctctcacggtggagtgacacctgccaatgacggcgcctcccatcagtgtattgaggatatggggattttgcgtacactgcccgacatgaccgtgatcatgcctgcagactactattctgccaggaagcttgtgagggctgcctatgagacctgcggtcctatgtatcttaggtttaccagggatgccataccgctgatctatgatgaaaatgaagagtttgtcattggaaaagcaaaacagcttcaggatggcagggatctagcgatcatcgccaatggagacactgtccgtctggccctggaggcagcacagacgctggcagaacagggaattgccgcccgtgtgctggatatgcacaccgtgaagcctcttgacgtggatgctgtaaaggcatgcattgatgagattggaaagatcatcactgtggaagaccacaatattatcaatggacttggaagtgcggtgtgcgaagtggtggcagaggcaggcagaggtattgtgaagcgtgtgggcattcaagaccagttcgggcagtccgctccctatgagagacttctgaccatcaatggcatcacaccagagaagattgtggagacagccaaagaaattctaggatcatacaaataaaagttagggggatacaagaatggattttaaaggaagagcagcaattgtaactggttctggttcacccagggggatcggccgtgagatcacccgtgcactggcagaaaaaggctgcagtgtggcagtggcggatatggacctggacggagctatgacaaatgcagaggaactaaagaaggagtttggctgtgattctatggcagttcaggtaaatgtcacagatgaggcttctgtaagcgaaatgtttggggctgtatttgagaaatatggaagaattgatattctgtgcaacaatgcaggcatcacccagccggtgaccattgcagatatgacaaaggatgattttaaccggattataaatgtaaacctgttgggtacatttctgtgttccaagctggtggttccatatatggtaaagaatggctatggacgcattgtgaatacatcatccgtatcagcaaaatgtggcggcggtgtatacggcggcgcccattattgtgcggcaaaggctggtatcatcgggtttgccagagctcaggcaatggaattgtgcaaagaatataaggacatgatcacagtgaacagtgtctgtcccggactgatcgccacagatatccgtgcggctttggatgacaagaaggagcaggagtcccgggcaaagcaggctatgggacgggccggcacggcgcgtgaggtggcaaataccattgtatggctggcatctgatgaggcttcgtatgtgtccggagaggatattaatattaatggagccagctatttcggataaggctggcagctataaaaaaggagtaccccaggatttcgatcattaccccgcaggtttaaaaggaccggcggggtaatgacatacacgcaaggacagcggctttatttctccgtgagttctttcacatagctgatcatggctttcataacaggagtaatgggagctcctttttttaacagaaaaccagtctggaagtatatgggcggattcagcttaactaaggttacatcactgtgttcgtccagattgctgaaggaatccagcagaacaaaggcgatgcccagattgtctttaaccatttgataatccaggccagtgcgatgagggacggttgtccttgggctgatgcccagttcccgaaattccgcatccagcttttggcgtatgagggctcccggaggataggtgatgagcagctcatcttttagttccgtcaaagagacggaagagcatttggacagaggatgtttgcgggagatcatagcgcagagctgacagtgagactgcagaggaatgatcctgtaaatttctgtatcgtatttttcaggaatcagtgtatatgccatatccagccggttatctaaaagctgctccagcatgctggagttaggagcctcggtgatatgaatgttgtattctggataatggtcgtaaaattctgtgtagattttgggtatgagctggctggcggaggagctgtaaaatgcaatgtgtagcgttttttggatgccgccggaaatacgctgcattgcctcctgtgccagctgggctgtcagcaatattttctcaacatactgcataaattcttctcctgccgctgtaaaggataaagggcgggtattgcggttgatcagcgttacattcagttccgactccaggctttggatggcgcttgaaatggaaggctgggaaatatattgttcttccgcagcttttgtgaaatttcggagccggtagacagactccagatattctagttttttgaaatccatgggaacctcctttaatagtatgtacattgtacaatttaacggaaaaagatatagaataaaaaataatttaaataaataaagctgaaaataaaaggcaaaaacttaaattaattgtgcagattatccaacaacatagggccatcctatgatgggattataacacgatatttcattaaaattcaactatgtgataggataatattacagatcaacgttgattaatcccacgtaaacttaagcctgttgtattgtccacacagagttcaacaggtttatttcagaaaattagaaaaggaggcagaaaatgagaaggtatcagaaattgttggtgctgggggcagcggcattgagcatgacgttcatgacagcaggtacagctcttgcggcagaggaagcggcaaccgggggcgttacagtggaagcaaatgcggattctgtaacaggttatacagcaacctttacatacgtaaatgaaaatgccacaaatgtacagctcatgggttcttttgatttttatgtggaaaatgatgagaatctctatgcagcagggtttaacctgaaggaagacgatgacgtgagaacttatctggtagatgtggcagactggaataaggattccaatctgcgccatgtaaatctggatacttatgtgatcgatctggaagaagagggtgacactggcgtatggaaacattccattgatcttccggggggttcttatgtataccgctataatgtttcttataatgacgggaaatattatgagtccatcatggatccggacaacaaccaggacatcaagacattgggagggtatggaaagagaagcgaattctatgtgccctatgatgccgaaaagcagtcaccgtatgatgactggacatttatcgctccggtggaaaataaggaagacgcaggggtacgtcttcactttaattacgtaggcagagatggtgcggtgcttcccgcatggatttaccttcccgcaggatatgaggaagaccgggaagagccttataaggtattgtatctctctcacggaggcggcggttctgagacagactggtttcaccagggacatgcagacgagatcgttgaccggatggcagcagagggaaaggttgagccatttatcatggttgccatgaacaattccgtatttaattgggattatgatgcgatcttcgaaaacatgaaggattatctgatcccctatatagaaaaaacctatcatgtatccacacaggcagacggccgggcctttgcaggtctttccatgggcggtatgaccaccagccagatgctcttccacgatcccacactctttggctattatggaatattcagtggatcggatgcaggcaatatgcctcagctggatgactattcccaatatcaggaggctaatattttcctgggtgtaggttattcagacagtgcatatatgaatgattcctatggaaccgaatctgacaggacccttatcgctctggctgagaagtttgacgaaaagggaattgagtacaacaacaaacagggagtggatgtggttcagggtggtcatgactggtatacatgggatcagctcatcagagatttcattgagacagcactctggaaataaaaaattcgacaatttggagggaaatcatatgaaaaaaagaacaatgttaattgcagccctttctactgcattgatcctatcaaccgttgttgtccctgtatctgcaaatgacataacggacggctcattgacggaccttaaggtggaggacgtggcccagctggtggattttgattttgatgagggcactacaacctatgatatcacagtatttgaagatgtgtatggcgtgcgttttactcctacgatcaccgggcaggcggacagtaccgtaaaggttactatgagcggcagcggaattgaagaagagaccatgactgtgggaaaaaatgaccagtttgaacttcatctgtcagaggcacggcagtgcagtgcctttgagaccagaatgatggaagatgacaatgattacaaggtagtgatcgaggcagccaatgaaacctatacagtgaatgtacaccgtccgggaaccgatgctctggtggaaaagttcgaaagactcacctgggatatgggagatggaaaagagatgacatactggctgtatgttccggaagattacagtgcggataaggaatatccggtggtgatcactccccacggaggcggacagtttgcagtagacgcagaggatattctggtgagaacggcacaggccaccagctttgttaaatacgacaaggatgtgatcgtgatcgctccccacggcaattatacagacctgagtcttacagagggattcggctgggtagacggcgagcttaagacaactgtttttggggatgcggtttatgacatactgatggatgtttgtgaaaactacagtgtggataaagacaaaatctcagttgcaggcggctccatgggcggcgctggtaccatgggaatcgttgcggcacatccggaaacctatgcggcagcagtggtaatttgtcctgcagtatcagctgacaacaaagcagctatgaaatattttgcagatcagatcaaggattccaatatcattttgtggctggttcatgcagaggaggatcccaccattgattttgaagtgacagcgaacctgaaaactgtgctggatgcatgcggggtgaaatacaatgagaccattttctcctgcagcaattacttctggcccaccgcgcactttagctgggtaccatttcttgacaacgaagccaatgttgactggcttcttgcccagagcaaataatcattaaatccgttatatagaaattcggacagaagagcccctttaccttatcatttctgaaatgataaggcaaagggtgttcttcgctttttgctgtatagagatatacagcgttgggggtagaaaaagtggaaacaatattaagtgatttcagtattatggcaattcttttgatggccggttactggctgcggaaaaaaatcagaatatttcagaaatattatataccagcggctgtgatcgctggggggctggggctgctgttgggcacacaggtattggggaggctctccccggtgtgtatccgcttttccatggagagtaagaactatctgcagcttttgatgatgcttgtgttcaccagtgctgcactgggagcaaagctcaaccccaatacagtaaaaaatggttttaattttctcatgcttacatcttccaccttgctttttcaggtgatcctgggttatgttatctggaaggtttttcatatattgggagattctgtaccggtgggcttcgccgtacttccgtccacaggattttatgggggacatgggatcggtgccgccacagcggcagcgtttgaatctgcagggtattgggatgcaggagaaattatctccatctccaccacctttgccaccataggacttttatttggaattgtaggcggtatcatcgccatcaatctgggggcatcaaaaggagcagctcagtatctgtcccaagaaggagcacataaggagacaagggagagcgagccacagttggtgccgggaaaagtatttagaaccataggaacaggcatcgatcccctggctgtccagatctgtgcggtattgcttatctatctggctggcgtgggcatcacaaagcttttggcatgtctgcctatgatggagaacataagcgggctggcaggggttgccattgcttctgttttgggaaatgttctctataccaggactaagctttgtgaaatatgggatatcccttccattcagcatattaccaatacggctatggaatttttgatcgtgggagccatagctgggacaagtattgaggtggtggctttgtatggaaaggaaattatccttacctccctgcttattttgtctgcaaatacagtatttatctttgtacttgcaaaacgtctgttccagaaggactggtttgaacatgcagtgacactttttggtgtgtctactggggtgacggctacctctctgatgcttctgcacattgtggatccccaggagcagtccattgtgaaattaagcatacctgtctccattctcaccagcattgtcacccagaccttttgcctgtccgttgctccccttttacttttgcgcaatgagaaaggactgatagctggtctgtttctggctcttcttcttatgcttggtgcggccgggctggcagccaggcagaaatgatcaaaagtcctggtctacaaaggtctatattctcacaattttgtgaaaatctcctcttgtgagcagtttgtgattattctggggtatgatgaagataactcagaagggagagaggaattatgagtgagattgtgagaacacaggcattgaaaaaatattatacccttggaaaaaatatagtaaaggctctggacggtgtggatttttctgtgaaccagggggaatttgtggctattgtgggaaaatccggaagcggaaaaagcactctgcttcatatgctgggaggtttggacgtgcccacccagggggaggtttgggtggagggaaaacagctgtctgctctttccaaggagcagcttgcagtttttcgcagaagaaaggtgggctttgtttttcaaagctataatctggtgccggatctgacggtctatgagaatgtgatcctgcccattgagctggacggagcacctgttgatgagaaatttgtggatgaaatcctgaatgtattaaagctgcaggacaagcgggaggctctgcccaacactttgtcaggaggtcagcagcaaagagcggccattgcaagagccttggccgctaaaccggcgatccttctggcggacgagcccacgggaaatctggatacaggggccagccatgatgtgatcggccttttgaagatggtggcagggcggtataggcagacgattgttttgatcacccatgatctggatatcgctcagcttgcagaccgcatcgttcatattgaggacggcaggattgtaaaggggtgatggttatgctgaagaataacaataagaaggtattgcggaaaatggccaaacgctccctggcaggaaataagcgggaaaatgtgatcattctcatagccattgtcctgtccacctttatgcttttttgcattctcactgtggggagcacttactttgaaatgcagaaaatgcagacaatccgcatgatgggttctgattttgatgcctatatttatggcggatttaatcaggagcagctggagaaatgcagaaatcatccccttgtggcccaggccggagtggaaggtctggcgggaagcgcccaggaaacagccaaggacagtactttaaatacagccatggtatgggcggatgagatccagtggaaggaatttaagctgccggcatttcagtggatggagggaagctatccccaggaggaaaatgaggtgatgcccactcagaacgctttaaaggattttggtatggaggatctgggaattggagacagctttactcttacttataatgatggcatcggacagcataccagagagtttaacattacgggcttgtgcaaagactattccgggagtaagattttgtatatgtcaaaggttttttttgaccagtcaggatatacagtggaggattacggaaaaggttttttgtacatgaagtttactaaaagtttaattcctgagaaaactcagcaggagtttcaggaggctttggggctgaagcggaaccagcacctgtttttttctcaggatacagcccggtccattgagattttggccgggctgacaggccttgtgctggcggtgtgcatcagcgcctatctattaatttataatattttatacatctctgtgtcaggcagagtgagatattatggtcttcttcagaccgtgggaatgacagagcatcagatccgtcatctgatcagatataaaatgattttcctggggactctgggaattgtggcaggacttatgctgggagcaggggcctcccttggtattgtacctggaattgtgaaaaatctgggcgtccgggagttgtccgtacaagtggccttccatccggccgttctagttttgtgtgtgggagtcgcagcggcccctgtttacctgggtggaagaaagcctgcaagacttgcagcaaaaatttcccccatagaggccgtgggttaccggagctgcaagggaaaaagatctgtccgctccaggagaaggggaaaacttttatggcgcctggctaaggagcagctttggaaggataagcgcaaggcctttactgtgatcctgtctctgggggccagtctgtctgtatttttgtgcctggtaacgttgatcgccagtcagggaccccggaccattgtttctaattatatgcagggagatatcatcatcagtaatgacatccttcaaaacagtgaccgggagaagtgggttcaggtcctggatgatagcctgctggaccagatcacagagctatcgtctgtagaagaaattcacaggatatacaatgaacagatcgtggttccctgggagccggattttgcggagctttggatgagcaaattttatgaggtgtggctggatgagacttatgatgatgtgaaagagctgtacaaggagaatccggaatatttttcttcctatcttagtggaattgactctgcagaatttcaatatttaaacgataccctggagcagcctgttgaccaggaggcttttgaaaaaggagaatgctgtattctctatagacatggactggatctggagctcagccaggtgaagggaaagaaggcctcctttttcctttacagacagccggaaacccaatattcccttgagatcgaagggctggtggatgacagctattatgccaatatggcagggataacaccaaccataattgtaagtgatacttttttgaaaagtattgtggcggatccatatgtgtcaaaagtgaatgtgaagtacaaggaggcttttgacaattcggcggagaatgatataaaggctttgttggaaaatagtccctatgcaagagatttttcttgggaaaccaagctggaggagctggaaaatgtgaaaaaagcccaagggaacatgatggggatcgggatggggattgcccttatgctggcaattattggaattatgaattatattaacaccgtgtggggaaatattcaaaaccgtctggcggagctttcaattatggaaagtgtggggatgacagaggggcaggtgaaaaaaatgcttttcttggaaggtatgctttttgccgccggttccgtgggaattatggctaccctgggtcttgggatcacctatgcgatctatcagtccatgaattctatgggaatcgccttctccataccggcagttccggtctgcgcggtgattttatttataacagctgtgtgcggggcagtgccttatattctttaccaggtgatcgtgaataagagatccgttgtggaaaggatacgcaatatagaataaaaaaagggcgtcaagatcagtttacaaagaagtttacatgacagacaagggcagggcgtcagctcctgcccttaaaatatgctgtaatctgagcggtttttcctggctttttcgtctaataatatagaagataaatttccgtgggattatccattgtgtaggagaagattttatagtaaaattggttcattaaaagcagggggagtaataaaatgtatactatagatctgcattgtgacaccattggaaagctggccaggccgtggcacaggggaaatattatgagaaatccttattccgtggatcttgtgagactggaacgctccaatacactggttcagtgcttttccacctttttcttcagcggactgatccctggggctgtgcgggaagaaaaggcctatgagattgccagggagcgggcgggggtttttaatcaatgcgtgtatgaggcagggggaagacttttccccatccttaattatgaagatattttgtactgtatggaaaacaagaaggtgggaggcctgctcaccttggaggatgcagtgccagtgggacacgacctgaagaagctggaggagttttaccaatatggagtccggctgatcacccttacctggaattatgagaattccgtgggatatcccaattccaggaatgcctccattatggaaaagggtctgaagccctttggaattcagctggtggaggagatgaaccgcttgggcatgcttgtggatgtgtcccatttgtcagacggcggcttctgggatgtgctggagcacagcagccggccggtgatcgcctcccattccaatgccagggctgtgactgcccatccaaggaatctggacgataacatgatccgtgccattgcccaaaagggcggtgtgatcggtcttaatttctgtcccggatttttgggggaggataagaagagcagtatttctaatatgctccgtcacattcagcatatttaccaggtaggcggggaggatgtgctggccttgggtacagatttggacggaattacaggcaggctgcagataaacagctgcgataagctgccggacctggccaatgcccttctaagacacaaaatgtcacccagagttctggaaaaaatgtggtaccgcaattccctgcgggttatggaggaaattttaggataaaaagccagcagcaggaaatactatttttagatggatgccaaaaatcccggatttatatcgaaattgtaaatcttttctaaaaatagaaaaactgggtgcaattaggtgaaaatatgttataatggaacagatatagaagaatagaagagcttaatgtcgaggagtagcatttacatgagtaacaacaacgaaaagaaagacagtcaggaaggcttggacgtagagtccgtactgcgtgaaactcaggagactttaaggtcgcaggtggaggacatggcagagggagagaaggcagaggcctcttcccagagcctggaagataaaatcgcagaagccatggagaaaatcgtcacagacacagttggggatatgcctattgcggaagtaaaggtcacctctcatccgccaaagacaaaggggctttctcctgaaaaggagaaaaaagccaaagaatccgtacccaaatcccgccaaagcgagaagaaggaagaaaccaaatctgccagaccccagggggtgtctatgacctctctgaagttcgatgcagtggcaccgcctccaagtgagcagcagccccaggaggaatatcctgaatttgacaatgagaagaagcataaaggactgaaaataaccgggatcgtgctggccatgctggtggcagcagcaggctgcatatatgctggattttcctattactacacagacaaatttttcccgggaacaaccatcaacggtattgactgttccaatctcacagccattgatgtagagaaaaaaatagcggcaaatgtggaagattatgccctggtggtgctggccagaaatcaggaaccggagaccatccagggaacggatattcagtataaatatatgtctaacggagatattctcagaatcctcaagaagcagaagtcctatgaatggatcacgggctattttaaagaccggtcctattcagcagatgagaatattacctttgataaggagcttcttcaggcaaagcttcaggaattaagctgtgccagccctgagaaccaggttgctccccaagatgcctatattgattataaaaatgcaaaatttgaaattgtgcctgaaacccaaggaagcacactgatcacaaacaaggcatatcagatcatggagcaggccattgcccagagccagccgcaggttgacctggagcaggagcaggcctatgaaacagcagcggtgactcagaatgatccccagcttctgtcaaccttggaggtttacaacaattataccagggccagtatcacctatgtcattggtgatgaccgggtggtattggacggaaccaccatcaaggattggctcagcagggatgaaaccggccagcttgtgaaggatgaagaggagtttggcgcccacatccaagagtttgtctctgatctggcagcaaagtatgataccgttggaacagacagacagtttcaagctaccagcggccggacagtcacagtatttgcctatgcttatggctgggagatcgatcaggcagctgaggcagcaaagcttacggaagagattcagaacggcgaaactgtggagagagaaccgatttacagtatgactgcaaattcccatggcagcagcgatgtgggagatacctatgttgaggtagatttaggaatgcagcatatgtattactatattgacggagctttggtgtttgaaagtgactttatttccggaaagccggacggagagcatgataccagaccgggaattttccttctatataatagggagagtccttctgtgctcaggggcgagatgaagtcagacggaaccagggaatatgagacagaggtacaatattggatggcatttgacgggggcattggcttccacgatgccaactggcagtacaatggattcggtggaagcctgtatgcccagggttatggctcacatggatgtgtgaaccttcccccggatgcagctggtcagctgtacagcattatccgttacggcgatcccattgtatgcttctactaaatatatgtgaaaactgggcaccgcgctatgtggtgcctgtgttttaggaattacaaaagaaggcgggaatgaatatggatatgatggattcgatcgatgtgctcattggagcggttgctattgtatatgggatatttttatatacagggaaagcacagatcttcaaagatcccaaagtaaaaaaggaatatgatgaattaaaattaagaaaatacatgggtatctccgtggtccttatgggagtggccaccttcatcaactggaagttcccttccatggctatgaacatcggttatgtggtgtttattttattggattttgtgggagtggctgtgtatatgaagaagttctgtaaggtggacaagaacaaataacaaatttccagggaatgcacaaagctgcttcgcagctgtacattggcgaataaagccgtcaagctcctcatgattgagggcaggggagttgaagtgtcgaagctgcttttcttgatgtgtaaaagagggataccgcataaaaaacaatgcagtgtccctttttattttcggcgcgagtgtgtattttttatgtaaaattgtgtctatcaaagaggctgagagattctccttaaaacagccgggtcagatccataggtgtgctgatacggtaatccgggtcctttacatccccgaagccataggaggcaaagacgaaaggcacgccggcctcccggcaggcgttgaaatctccctgggtgtcccctacatagacgggagattttaattgataggtgtccacgatctgacggatattggcagctttggcattccctgtatcccctgggcacaggtggcctttaaaatactgttccaggcctgtgctctcaagaaatacctcgatatagcctgcttcacagttgcttaccagatacagaggatatttctttgacaggatctgaagtgtcttttccagatccgggtacaggggcgcaccgtgtttctgaagagcccggtgttcagcctggcagcaaaggtcaatgagctctaattggcgctccctggtctcattggaaaaaacctgctttgcaatgtccgggagaagctggccaaacagcccatgaagcatctgggcggtcacctccaaatttaaatccgtctcctgagccagacagtcggtccaggatttagcaacaatgtctgtggaatcccagagggttccgtccacatcaaaaataataccgtctatggttttcataaaaaaatcctttcttaatagaatatgtgcttattttagcgaagaaaaacgaaaaaagcaactgcctttttctctgtttttatgttatgataggggacgaggtgtgagaatgaaatacgaaaagattagacagggaacctttatcagccgtcccaaccgtttcattgcccatgtggacatagatggcagagaggaagtctgccatgtgaaaaatacagggcggtgcagagaattgcttgttcccggagcggcattggtcttgcaggactgcgaaagtccttccaggaagaccagatatgatgtgatcgcagtgaagaaaaacggccgttggatcaacatggattcccaggtgcccaataaggttgttgctgagtggatcagggaaagtcaacttttttctgaaaatgtttctgtgaaaatggagaaaaaatacggaaattctcgttttgatctatatatggaggatggggaaagaaaagctttcatggaggtaaagggcgtcacactggaggaggacggtattgcacgctttccggatgcccccacccttcggggcgtgaagcatatggaagagctgtgtgcctgcaccagagagggctatgaggcctatgtgctttttgtgatccagatgaagggaattacaaaattccagcccaactggaatacccacagggaatttggagaagctttacagaaagcaaaacaatggggggtgaagcttctggcctatgactgtgtgatcacctgtgacaccatacggctggacgcccctatccccattgatctggaggatacacaatgctagagaaaatccccacccccctgacagcctggtatcaggaaaacaaaagagagcttccctggagggataaggaaaacgcctattatacctgggtttcagagatcatgctccagcagacacgggtggaagcagtaaaaccctatttttgcaggtttatccaagagctgccggatgtacctgcattgagtgtctgtccggagaaacggctgatgaagctctgggagggacttggctactataaccgggtgagaaacatgcagaaggctgccaaagaagtggtggaaaagtatcagggaatccttccggcggattacgaaaagcttttgtcccttccaggaattggcagctacacagccggagccattgcctccattgcctatggcctgcctgtgcctgcagtggacggcaatgttctgcgggtgatcaccaggatcactcaggacagcagagatattacaaagcagtcggtgaagaaggcggtggagcaggagctgctgcagatcatacccaaggactgcccgggagatttcaatcaggctctcatggagctgggagcagtggtctgtgtgcccaacggacctgccaaatgcggggaatgcccggtttcctctctttgcatggcccacagaaatgggagggaaaatgaattccctgtaaagtctcccaagaaggaaagaaaaattgaagaacgtaccgttcttattattcaggacggtgagcgcactgccattcagaaaagaccagcagccggccttctggcaggtctctatgaatttcccaatgtggcaggacatctcacaggggagcaggcgctggaaaaagttaaggaaatggagcttatgcctctgtacattgagaagctggaggcagccaggcatattttttcacatgtggaatggagaatgaacgcatacaaaattcgggtggaatctttagagcagaccaggaagggaaagcttttatttatccaccgggaccagtggtccagccagtatgccattccctcagccttccacccatatgccaagtatcttaaggaggacacacaatgaaactattaagtattgcagtaccctgctataattcagaagcttatatggagaaatgtattgattcccttctggagggaggggatgatgtggagattctggttgtggatgacggctcttctgaccgcacggcagaaattgctgatgcctacgcagccagatatccggacattgttaaggccattcatcaggaaaacgggggccacggagaagctgtgaacgcgggcatgagaaatgccacaggcctttattttaaggtggtggacagtgatgactgggtgaataaggaggcctacgatactattttgaatacattaaaggagcttctgagggggcctcagaatgtggacctgctcatcagtaattttgtctatgaaaagcagggggcccgcaggaaaaaggttatgcagtacagacgctgcttccctgtgggagaaattttcggatgggatgagatcggccatatgcccaagggaaaatatcttctcatgcactcaatgatctacagaaccaagcttctccatgactgccagctggagctgcccaagcataccttctatgtggataatatttttgcctatgagccgctgcccatggtaaaatctttgtattatctggatgtgaatttctatcggtattttatcggcagagaggatcagtcggtgaatgagagtgttatgatcagcaggatcgaccagcagattcgtgtgaacaagcttatgatcaatgcttatatgaaatatgattacagcaataaaaagctgcggaaatatatgatcagttatctggatatcatcactacgatctcctccattatgctgatccgttccggtacagaggaaaatcttgagaaaaagaaggagctctggaattatctgaaggagacagacggggggctgtatctgaagctgcgctatggcgttctgggacgggcggtaaatcttcctggaaagagcggcaggaaaatgtctgtggcagcctaccggatcgcccagaagttctacgggtttaattaagaagacataaattgcagacaaaacaatagaaaaggaatggaggaactcccatggagttccctcattccttttttccatatttgcgggcagcttgtatgtggggttaatccttatgcccccgggcattggcaagggcatgtttttgttttttggccggggccggggccttctcccgatagaagaacagataacctgcaagggccagggtagcacccatgctcacatccacgaaggaatgctgcttcagaaacatggtggacagcacgatcaaaatggtaagaaccaatgagccgtaccggatcactttcttgtctctcagcgccttgcaggaggtgatagacatatggatggccagggaattaaatacatgaatgctgggcagaatgttggtaggcgtatccgtagcatacagccattttaccccatccacgaaaagattgtccctggcaaactctgtgggccgcaggtggtggccgttgggatagaaataggatacgatcaaaaagatcgtcatgcccatcatcagattgaagacaagctgataatattccttccggtcattatttttgaaaataaagtacaggatagcaaagatcatgtacggaaaccacaaaaggtagggcacgatgaaatattcacaaaagggaatataatcatcaaacaaagtatgcacgatgtggattccatgtacatgacgttcctccagcagggcaaagaggattgtatatactatggcgtagaccaggatcaccaggccgtgtttgtattttttcaaaaatgtaaccaaattttcaccttccttaatattaaggcctcaactgaatcaaaaaggattatagcacaggtatgattacttttaaagtgtcattttccaatcctgcagaaatctctgtggcaattcctcccgattctccgtcccggtgaacgcagagaggggtgggacattgtatttgtatgtttttgcaccggagaatatgtatacctttaaattttgtgtgctttccgaaaagcgccgaaggaagacaaaataaaatcttcagtttgctcatatcactgatgacgatcacatccaaaatggtgtcctgggcagaggcctgagggcacattttgaagccgccgccctcatatttctgattcatgactgccgcaaagtatactttcttatagcggcacatgcgtctgccgtccagttgtaccaccataggtccgggcctggacaaaaagagctgtttcagtgcaatgagcagatatgtgagctttcccagctttagtttatttaaatactttttaatgggtgaagccagtgcttcctgacatacagcagcgtccatgccgattccgcagcttacgccgaagcggtgccgctgtccgttggtttctaaatatcccacgtaaataggggccacagccttctgctccaagatggagtttaaagctgcctggggctgggatggaattcccattcctctggaaaaatcattggctgatccggtgggaatatatccgaaggtcaccttcttaaaatcaacgatgccgtccagaacctcattgatggtgccgtcacctccgatgactgtgagaacaatctcctccgtcagtccccgggtaagttcaccggtgattttccgggcatgtcctgcgtatttggtctgaaataccttataggcaacgtttcttctcacaagctctgcgcggactttttcccatatggaagcacccatgcccgtgcgggcatgaggattcacaataaaatagtgcattgtataaccctccccaaacagggcgctgtcctcattgtaaacagccacccaagtactctcatgaatatcataccatccgtgtcaaggatttacaaataaatttttcagggatataatgaaaaaagtataaaaaagaagaggaagaagatctgcggatttatacagagagggaggagaagcatggagttatcagaaggagtcaagcttacgggtgagctggtgaaaatagacagctcagatcctggggcctatgagggagaaatgggaaaatatgtgcagaaatggcttgggaagcatgtaccaaaggctgcgatagagacctgggaggtgcttcccggccgctgcaacatccgggcagtgctgcaaggagagaaaacccatccatccctggtattcatctgccacatggacactgtggtgctgggagagggatggaaggaggcagagcctttgtctgcgcttttaaaagacggcaggctctacggaagaggggcctgtgatatgaaaagcggtctggcctgtgctctgctggcctttgcagaagctggcagactggcagaaatacacacacccaggcatacggtgcagtttattgccacagtggatgaagaggattttatgcggggggcggaggcagttgtccagtccggctgggtgaccgggcaggactggattctggacacagaacccacagacggtgagatcagggctgcccataaggggagaacctggatggagctggaggtaaaggggatcactgcccacgccagcaccccccagaagggagcggatgcagttgccggaattgcggagatcatcagtgagatcagaaaagcagtggagaagcttcccgtccatgatgagctgggaaggactacggtcacctttggtatgatccagggaggctaccgcccttatgtggtcccggatacagccaaggtgtggatcgattacaggctggcgcctcccactgatactcagacaatcctggggctggtaaaggaggccatggcagcagggcagaagcgggtccccgggattcaggcaaaatacaaaatcacgggagaccgtccctgtgtggagggagacgcctgctcaaagcttttcaaggagctggcccgggcccatgaacgagtgtgcgggcagcctggggcggtgggaatatttcccggttacacagacactgcggtgatcagcggcaggcttgacaatcacaactgtatgtcctacggcccgggaaatctggagctggcacataagccagatgaatatgtgcccctcaaggacattgaccggtgcaccagggtactgaaggagctggtccgggctatggcttttccggaagtctaaattggaaatggaatataaaaataagggaaaagagaggaaatgcaatgaaatataagaagacagttctggttctaacaggaattctgctggcggcaggtgtcgtggcctgctccagacaagaaaaggtacgaaaagaaaatgacacccggcagcagggggcagatgaggaagtgacaggaactccctctgctgctgagcaggaggagactccctccggacaggatgaggagattgagatggagggagaggagatcatcggaactcctgatgacggtctggaaaccgtgacccatagaggcaccattgtgtcccttaagggcagccatctcatctaccaggtaaaggagggtgctgattaccagacagatctgtcccagattcctattacaggcccggaaggagaggaatgggaggcggaagatttaaaggagggaatgaccatcgagctggacaatgacggcatcgcaatgatggactatccgggaaccattccccatccgctggctctgcgggttgtggatgcagaatagaaactagtatagaaatgagatatcttatgaaaagaagccattgtcttggttatgttcccatgagaacctatccagggcaggactcttagaaaaagatatctcatttttattatatatgtgttgacattctatattatacgatatataatatagaaaaataaaacatataaattatcacagcatataaaaactgcataccatcctgtccaatatacaaatctctggcaggccgggccgctgctgtgaaaatagaaagaaggggaaaggaatatgatatttacattaaatgcacctatgctggatttcctggttctttcggtgataaacaaagaagacgcctatggctaccagatcagtcagatactgaagacggtatccaatgcaaaggattctactctttatccagtgcttcgccggctccaggaaaataactgggtggaggtatatgaccagccctaccagggacggaaccggagatactaccacattacagaggcaggaagctggcatcacagagaattgagccaggagtggaaggaattcagcagtgccattgaagaaattgtgaacggaggaaatgaacaatgaaccgggatatttatatgaaatgtatgggcgaatatcttcggaagcttcccaaggaagacttttacaccgctatggaatacttcagagagtattttgacgaggcaggaccggagaacgaggagcaggccatcaaggatctgggcagcccggcccaggcggcggaacagatcatcatggatatggctgtgaagaatacacaggaagcgccaaagaaaagtgtaaagaggaatttttccgcggtgtgggtgggaatcctggcagtgtttgcggcccctatcgcacttccgctggctttttccgcagtggtactggtgggcagcctggcttttgtgatacttactttgttggcctgctttgtcatcactggggtggcattggtagctggtgcggtactggccattatcttaagcgctattatgctgttccgctcacctattaacgccataaccaccattggtgtatcgcttttgtgtatgggactgggacttctcatctgcccgcttgcggtgaatcttacaaaagcttgtttgagaggtatgatcaggatattcggaaaaatggtaaaaagattttctaaaggaggtagtgaaaatgaaaaagaacagtaaaatttatatggcggccatgtgctgtattggagcaggagtcgtcctcactggagtgggggttgcggcgggaggatggccgggagtttccgtgggggcaaccggtattcacatggccggtgagtccaatcagcgggagccctatgtgctggagaagacaaagctggaggaattctcctccttcactttgaaggtggattattcagaattatccatcatcccctctgacggttattatttagaataccgtctgtcaggttctggaggggaacccaagcaggcgataaagaacaatatttttactttttctgagagaccgggtaatggttttggagaagtacagattttcggctggggaaattttaactggggttctgataaagatgaaaaatattatgtaaatctctatgtgccccaggataaggtttttgaggatataagtgtatataacgattgcggaaatgtgaccatagaaaacctttccgcaaagaatatggagctggagctttcctacggagatttgacggtggataccctgaaaagtgaagatatttccatagatatggattccggcgctgtgagggcgaataagattgacagcggtcaattgagaattaataacagctacggagatgtgaaggtccaggaaattttatcagacaacgcagaaatttctcttgattccggaaaatttaccataggcaagattgacacacagcactttgcactcaataatgattatggagatgcgaagctggcagaagcctccattcatacaggagttattgagatggattccggagatctggagattttgggaggaagctttgaggatctggaggtggagagctcctacggagacgtggccattgaattaaaagaagatccatctctatattccatgaatctgaaaacggattatggttctatccatacaccgttcccaggaagatatgctagtgatgatacagaggaaaaatttgaaatggacggaacacaggaccgtagcttgcgtattcactgtgattccggaaatattgatcttacttccacacagaaacagtcataggctgtcgatcagaagaaaacgccctttcccgtttttatgggaaaggacgttttttattacattaggaaagttcactgaactttcctaatgtaataaaaacgtgtctagcccagaaaaagcttccatgcagccaggatcacggagaagactgccactccttttttcagaagctcaggcttgatcagggaggtgttcttgctgccaacccacacaccgattccgtggctcaccattgagaggatcagggggagtataagggtgtgcaggtcgcactggagggtatagccgatgcaggaggggatggctatgaaaatagagtcaaataatgccacccccacggctgtcttcacaggaatccccaggaccaccagcaaaggcatgaccaggacaggtcctccggcccctgacagggcacagatggctcctgtgacaaagccaaataccacacacaggggcagagggagaagggtacccttgtctttttcctgggaggaggcttttttatcctttctcaacaagatggagattccagataaaagcaccaccagatagagaatttttttcaccagcccctcgtcaatgagaaggttcagctttacacccagaacagcaccggccaggctgcctatgctgatgtatagagcgagtcttacattgagatttttggccttatagtaattcatggaaccaatgatcccagagatcaggaaggcaaaaaagctcagggccagtccctggacagtggacattcccagaaaaccagagtagagcatgggcagtagaaagccagccacgcctgtaagtccgatcaaggcgccgatgatcaggttggctatgattatgataaacagggtcataagtgatagtcctcctggcagcgggaagcttcatagagaattctctccctatccagaacctgaatttcccggtttttcattaaaatctttccccccacaatggaatcccttacatccggggcatccacgctttccagcagagtgttggagagctggccatagagggcaaggtgaggagaagtcaggtcaattccaatcaggtctgcacggtatcccggggcgatcataccacccagaggattgcccagacaccgctggccgtttgccgtgaccatctttaaaatggtttttgcaggcattaccgcagggttggccagaggaactccccattttaaattcataacagagcggaatagcttcatctcgctccacagacttaagccgccgtgggcagccccgtctgttccaagagctgtggggatgcctttttccagaagggaaggagtatccggcgctgccttgccgcagttgctgaagggacagtggcacaccagggcccccctgtctgccaaaagctctttctcattttccgagaggagcaggctgtgggctcccaggaagcggtcatttaaaattcccaggctgtccagatattcataggggcgcatgtgctccttttccatgaagaagttgatctccccagggtattcattcatatgagcctgaagaaaggtgtctttttcaacagcccgggccccggcggcctccattaattcccgggagcaggagattaaagagcgaagagaataataaaccttcagatttccttttccgtgaaaggcttcataaagccggtctgtcttctccacagcctgccgggcgtccatggcgatggaggcaggcaggcccttctggtccatggtggagtaggacagtgccccccgcagtccggtttcctggtaaacggcggctgcctcctccatataatagctgcctgcatcgataaagcctgtggttccgcagcggatcatatcccaggcggcaagctgggcgctgaggcgcattttctcaggggtgagggtgctctcaaagggaagcatgatcctggtccagatcatgggcatttcgtccagcacccgtccacgcagaagctgctggccagtgtgcatatgggcatccacaaggcctggcatatacacacagccagagccgtccagggctgtgtcccaggtataggactgttccaggacgggcagggtgtcaattgcctggatgacaccattttgaatgagaatactttttcccttcaccagattaaaatttttatctacataatctgcatgtttgatcaataaattaccgtgtgttttcataaatcttcctttcccggcagaatcctttctgatgttctcagatggcatgggtggcagtgagcacaagctgtgcaatgcaggcagagcccaggaaggttccggtcattaccagcacgccgatgatgatcattttccagccctgctttaagaaggacttgatctgatcgctgatggagatgcctgcgtaggcgcccaccatggtaagaggagctgtgaaattaatcttgtccgctgaggcgatgacaaagtcccgcacaggagagatggggcttgccaccaaaaggccgatgatggagcagtatgcaataatgggcagattgattggaatcaacttgcttaaaataacagcggcaaaggaaatggccagaagcaccaaaattccagggagggattccataaatcccactttaaagccaaccagattggccagggcgattcccaggccggagatgatcagcatcacgatccattcaagatatctcataagtttcctccttctctaaatcctcttgttttctggtgagaacctcgctgggttccttgcggagccgggcgatcttaggctccagaacctgatacagcttccggcacagagggattccgatgaacatggccacgtagatgccggtaatgccggagagggtctcactggtgctggccagggcggagatttctgaagtcagattcgggtacacgattgccaggctggcagtggcgctggccatcataattcctgcacccacgccggaggccatacccaaagcatagggatggaagatccccagggaagccacgatggtggccatgaagccaaagtaaatggtacccaccatgccccccacaatgtagatggaaaggctgccccttgcctccggggagtctgaaccgaacatgttggtgaccagggccagattggtctcccggttaatggagtgggtggcgccgatggcctctcttttcagacccagaagaagagccacgggcagggcgatgaagatggttcccaggttgccaatctcctggagaagcagggcagggcctgcggagatcacggtctccaggctggctccggcgttgatcccaagcttggcgataaagggacagatggcgatgatcaccagcttggaggcagccttgacttctttctttttgaaaattttcaatacctcagggccgctgagcacacccatgatgatggaatagaaaatggggaacaaaatcaaggttcccggacccaggggaacctggatcttgccgatggcatcggcgatgatgataaagaggaaagcaaacagaaaaatcttatattctgttttcatgcgctctcccagggaagcgtaggtataggtttctttcttcatggaaaacctccttttctcttttcttactgcttttattataggaaagaacagggtcgaaaaaaaaggacaaatgggatattttggagaaaaaatttataaatttttaaggatttattctccatttcaggaatccaattgccagaaggaaagaagtacggtataatcttttttaagagatccaaaatcagagaagccaaagcgtggcagaggattttggacagtgaggtacataaggtacccagaaaatatggttgggaggaaaggaaaatgaccggagagagagacagcctgtgtgggaaaggtcagtggcggtggagcctatgacattcttattcaggatttgtgctgcattgtctgtgggactttttataggctttctgggaggctttgtgaaaatgaggcgaagaaaaaaagagtatacccagaaacagatccaaagatcccagagacttattaaccgggcggcggtttttatggagctgctcaccttttttgtgcttctcactggactgatctggtgtgtatatttcctgatcctggggcttgtggatccggcccagacggattacgcaaataatattgcagagctgatcgtggcagttttgacagttatttctattatatttgcatttgtggaatttttgagacatgacaacaaatagctcctgttgaattttacgaaagagacaggccacatagaggaaaaggggcgaaggctgtgacattggatgaactgcttggcagggttccggccctggaggaatacatccgttatatgcccggagagctgagaagccgctgtaccgtgcgcatatttcccaagggcaccatcatccaccagaaggatgaggtcctcacctattttggaattgtgtgcgagggttcccaccgggtgatcaatgaatttgaaaacggaaatatatttatgatcgaacgcaatgaccccattgattttgtgggggaggtgaccattttggcgggaaaagagagaacctccgtgagcattgaggcgatcacagactgtaccattttgttcttctccagaaaggattttgaagggtggattcagcaggatattcattttctaaggctggtgtctcagagggtggcttataaactgtaccgctcctcctataaccggggaaaccgtctgttctatccgcccaattatctcctattggactatgtggtaaaatacatccaagaccatgggcaatgcaagggggagatggtggtggggaaaacccgccaggatctctgtgaggagaccgggatatctgtgaagaccttgaaccggacggtacaaaagctgaagcaggagggccggatcgggatcataaaaggaaaaatttccatgaaccaggagcagttggaactggcaagggcctatatcaataaggagaaacagataacagaaaaggtacgaaaagaacaggcgccggaataatcccggcgccttaccttataaataggtaattttatgtttcataggatgaggaaaccgaatgtacatatagataaagaacattcctgtatttaccaatgaaatggtttattatacataaaacagcagcttgtcataggtaggatagggaagaaaattgtcagggatgagggcctctgcctggtcaaggaactgtctcagctcctccatatccttaagaagagactggcagcagagccgggaagctggcagctgttcctggcaggcttccactgtttttgtatccgccttgagtacctccagcttcgccaggatctgttcctgaaattttgtgagagtttccaatagggaggactcacaggtcactgaaatttgtgcagatacagcttttttcatctgtgcagtgtgcgcgatcttttccatataagagaaaagagctggaaggaaatccttttggaccatattttccagagttttggattcaatatgaatggtcttaacatagttttccagccaaatttcataccgggactgaagctcctgccttgtgaagattttgtggtctgcgaagagctttatgttcttttcacacaggaaatagggcagtgcatccggggtggatctcaggttgagaagtcctcgtttttctgcttcctgtacccattcttgggtatacccgttgccgttgaaaataatccgtttatgatttttaatggttttttgtaaaagctgatgaaccgctgtctccatctcctgggcaggggtatcctgcagatcctgggcaaactctctgagggactgggccactgcggtgtttagtacaatgttggggttcgctacagaagaggcggagcccagcatacggaattcaaatttattgccggtgaaggcaaagggagaagtacggttgcggtctgtgttgtcctttacaaaatggggcagcacatgggccccagtttccagctgaacggcatgggtcccgttaaaataagtgtcattttcaatggcgtttaggacctcgatcagttcatcgcccacgaagatggacacaatggcaggaggcgcctcgttggcacccagacggtggtcatttccagcacttgccactgagatgcgaaggaggtctgcatagttgtccacggctttgatgacagcggccagaaacactaaaaactgagtgttttccccaggagttttgcctggatccagcagattgcagccagtgtcagtgaccattgaccaattgttgtgctttccgcttccattgattcctgcaaagggtttttcgtggagaagacacacaaagccatgtctgtctgccacctttttcatcacctccatggtgagctggttgtggtcaacagccacattggctgtgtcgaatacaggggccagctcatgctgggctggggccacttcattgtgcttggtcttggctgggattcccagcttccacagctcctcatccagatcgtgcatgtaggcagccacccggggctttaaggcaccgaaataatgatcctccatttcttgtcccttaggtgcaggagcgccaaggagggttcttccggtgaagatcaggtcctttctttttttatacagctccttatcaatgaggaagtattcctgctccggtcccacggtggtggaaacatgggaagcttccttgttcccaatgagatgaagaacctttacggcctccctgctcaaggtttccatggagcgcagaaggggtgttttcttatccagggcctcaccgccgtaggagcagaaagccgtgggaatgtataaggttttgtccttgataaaggcaggggaggtggggtcccatgcagtatagcctctggcttcaaaggtggccctgagaccgccagaagggaagcttgaggcatccggctcacccttcaccagctccttgccggagaagtccatgatcacctgtccatcgtccgtgggggagatgaagctgtcgtgcttttccgcagtgactccagtcattggctggaaccagtgggtataatgagtagctccgttttcaacggcccattctttcatggccacggccacagaattggccacgtccagttccaggtgtgtgccattttggatggttttccgaagggccttgtacatatccttgggcagcttgttgcgcatgatcttgtcattaaaaacaagacttccataaagctgaggaatcgatttttccatattttcaatactcctttcctatgtaacaaatgtaacaaaaaaaggcaccttggttaaaaaaccaaagcgcctttgcttatgtgacgtattttacacgaaatgaggaggatgtcaagaagttttttgaaaaaattcagaaattccacttgacaaaatccatcaacattctatacttgtagcataagcaaaggcgcttcggacatgtccgaggtgccttttttatgtttgccaagccccttatgagtgaaggatggggagttgaagtgggcttgcccgctttgttagtctaggaggatggataaaaatggatgataagttaaaagaagcctgcggggtcataggaatctatgatttgtgccaagggaacgtagttccttcattgttttacgggctgacagcccttcagcaccgggggcaggaagcctgtgggatctgtgtttccaacacccaaggcccccggggaaaccttaaggcccacaaggacaccgggctggtcagtgaggtgctcaccccggaaattcttcaaaacataaaaggaaatctgggcatcggccatgtgcggtattctaccacaggggcatccaccccagagaatgcccagcccttgtttttatcctatgtaaaaggaaccctggctctggcccacaacggtaatctggtgaacgccctttctcttcgcaaaaagctggaggaggatggagttgtctttcataccacaacggattccgaggtgatcgcctgctatattgccagggagagggtacacaccagctctgtggaggaggcggtaaaacacacggcaggcattattcaaggggcctacggtctggtgatcatgagctccagaaagctggtgggggtcagggatcccctgggactgaagcctctctgtctggggaaaaaggaagattcctatgtgatcgcctcggaaagctgcgccctggaggctgtaggagcagaatttgtaagggatgttgagccaggagaaattgtcacggtgacaaaggatgggatctcctcagacagaagtctggtccaggagaaaagggcaaggtgtatttttgaatacatctattttgcccgtctggacagtacgcttgataaggtgaatgtgtatgaggccagggtccggggcggctgggccctgtggaagcgttatccagcacaggcagatctggtcaccggtgtgccggactcaggccttcctgcagccaagggctattcccaggcgtcagggattccctttggcctggcattttataagaacagctatgtgggaaggacattcttaaagcccacccaggaggagcgggagagtgcggtacacatgaaacttagtgtgctcagcgccgcggtgaaaggaaaaaggatcgttctggtggatgattccattgtgaggggaacaacaatttccagattgattcatatgctgaagaaggcgggagcccttgaggtccatgtgcgtatcagcgccccgccctttcgttatccctgctatttcggcacggatgtaccctccccaaaccagcttctggccgtctctcacacggtggaggagatttgccagatgctgggggcagactctctgggatacatggagacagaggatttggagtccatgacaaggggactttccctttgtaaagcctgttttgacgggaaatatcccataaaaataacaaaataattttctggatgcagggatttttagctaaaaatataacaaccggttcacatacgggacaaatttagaacagtaaaatgaacaaatttaataaaaaaacgtttgcaagagaggtgtttctgtggaaattagataaaaacagtactaaagaatgttaaataaaaaactattgacaaattcttgattttagcacataatatgcccatcaaacccaaaagcaaatggatttgtgtttgaaaacctgaatatgcggctataataaaaatgagcactaaaccagaagtttttgattaaaagaaaggatggttgatgaatatggctcagacaatgattaaatttaatgcagcagaagaggtaaaagaatttgtaaacgcagcatcaaagtgtgattttgacattgatatttcttataatcgagctatggtagatgcaaaatccctgctgggaattttcagcctcggcctggcaaagacactgactgttcagtgtcatggagaaagcaaagagtttgaacataccatacagaaattttccgttgcctgataagaaagcgtagactttctttgggcacaggtgatcaccggaaggggacgctgcctttggcagaacagcctgcaggtgaagaacctgacaattcctttggaaaggcagcttcctgcgggtacgactgatacttgcggcatcctggagaatccccggggagctttcttttatacctccagatcgctacccacaaagtggcatcacaattatttaatgatatagattgagacagacaagataagacgcacactgacaaagacgtcagaagcagaaattggagatcgccctcccccagtttctgcttttggcgttttttcgttatccagggaagtttttccggataagaaatacccttggcttttgccagttacagggcgggcagaaatttaacaattaagaaggagacgaggaaatggcagtaaagtatgtatttgtcacaggcggcgtggtgtccgggctgggaaaagggatcaccgcagcttctctgggccgtcttttgaaggccagaggttttcaggtgaccatgcagaaatttgacccctatattaatgtggacccaggaaccatgaaccctgttcagcacggggaggtgtttgtcaccgacgacggcacagagacagacctggatctgggccactatgaacgcttcattgatgaaagtctggatagaaattccaatgtgaccacaggaaagatctattggtctgtgcttcacaaggaacgcaggggagattatggaggaggaacggtccaggtgatccctcacatcaccaatgagattaaaagccgcttttaccgggggatgccaggagaagacagaatcgccattattgaagtgggaggaacggtgggagatatagaaagccagccctttctggaggctattcgtcaattccagcacgatgtgggaaaggaaaacgctgttttgctccatgtgaccttgatcccctatctgcgggcatcggatgagatgaagacaaagcccacccaggcaagcgtgaaggagctgcaggggatgggaatccgcccggacgtgctggtgtgccggtctgagcatgcccttacccaggagatcaaagaaaaaatcgccctgttttgtaatgtgccctccacccatgtgctccagaacctggatgtggaatatctctatgaggcccctcttgccatggagaaggagcatttggccgatgtggtgctggagtgtctgaacctaaaaagccccaagccggatcttcgggagtgggagaaaatggtacaggcgctgagaaatccccatagagaagtgaaaatttcaatcgtgggaaaatatatcagtcttcatgacgcctatctcagtgtggtggaagccctgaagcacggagggattgaaagcgggtgcaaggtggacatttcctgggtagacgcccaggagctcacggacaaaaatgtagaagaacggctgggagaggcagacggcattttggtacctggaggctttggaagccgtggcacagaagggatggtgctggccgcttggctggcaagggagaagaaaattccctttctgggcatctgtctgggcatgcagatggccattgtggaatttgcaaggcatgtactgggatacgcagatgccaacagcggggagtttgccccccatacctcccatcccatgatcgccctgatgccggatcaggagaaggtccgcgacattggcggcaccttgaggctgggaagctacccctgcatcttaagagagaatactacagcctatgctcttttcgggaaaaaggagatttttgaacggcacagacaccggtacgaggtaaacaatgcctaccggcaggagctggagtctgcaggaatgaaaatttcgggcacctcccctgacggcagaatcgtggaaatgatagaaatgaaagaccatccgtttttttgcgggacccagggacatccggagttccggtcacgtcccaaccacgcccatcccctgtttcggggatttataaaggcagcggctcaaaagagcagcagttgacatgagaatagaagaaaagagaggatgaggaaatatgaaagagagccagggactgtatctcccagaatttgaacatgacaactgtggaatcggggcggttgtaaacattaatggaaagaaaacccacgataccgtggaaaatgcattaaagatcgtggaaaacctggagcaccgggccgggaaggatgcagaaggcaaaaccggagacggagtgggcattcttcttcagatttcccataaatttttcaagagggtgtgccaggaggtgggaattcccattggaggggacagagagtatgggatcgcccagcttttcttcccacagcaggagatgaaacgcagccaggcaaaaaaaatgtttgagatcattgtggaaaaggaagggctccggctgctgggctggcgtcaggttcccacccagccccaggttctgggccataaggccagagcgtgcatgccgtatatcatgcaggcttttattgaaaagcctcatgacgtgagctccgggctggattttgacagaagactgtacattgcaagaagagaatttgagcagagtacagacaatacctatgtggtgtccatgagcagccggaccattgtatacaagggcatgttcctggtggggcagcttcgcacatttttctatgatcttcaaagtcaggattatgaatctgccattgccatggtccactcccgtttcagcaccaacaccaaccctagctgggagcgggcccaccccaaccggttgattgtacataacggagagatcaacaccatcaagggaaatgcagataaaatgctggccagagaagaaaatatggagtcaccttatttaaaaggccagcttcacaaggtgcttcctgtggtaaatgccaaaggctctgactcggccatcctggacaacaccctggaatttctcgtaatgagcggcatggagctgccccttgccgtgatgatcacaatacctgagccctgggacaacaaccataccatgtcccagaaaaagaaggatttttatcaatattatgccaccatgatggagccctgggacggccctgcctctattttgttttccgacggagatgtgatgggcgctgttctggacagaaacggccttcgtccctccaggtattatatcaccaaggagggaaccatgatcctttcctcagaggtaggcgtccttcctgtgccagaggagaagattgtacagaaggagcgcctccatcctggaaaaatgcttttggtggatacggttaaggggactttggtggatgatgagcagttaaaagagcagtttgcatccaagcagccctacggagaatggctggacagcaatctggcagagctgaaaagcttgaaaattcccaacatgcgggtagagacccacacaaaggaagagcggtccagacttcagaaggcttttggatatacctatgagcagtaccgcaccggtatcttgagaatggccttaaatggtacagagagcatcggggccatgggcgtggacacccctctggctgtcctttcaaaggaaaaacggccgctgtttgattactttaagcagctctttgcccaggtgaccaatcctcccattgacgccatccgggaaaagatcgtcaccagcaccaccatctatgcaggaaaggatggcaatcttctggaagaaaagccggagaattgtcaggttctgaaaatcaacaatcccatcctcaccaacacagatatgcttaagatcaaaactatgcatatggatggttttcaagtgacggttgtgtccatcttgttctataaaagcacgaagctggagcgtgccatcgatcgtctgtttgtggaggtggacaaggcttaccgggagggagccaatattctggttctctctgaccggggggtggatgagaaccacatggccattccctccctgctggcggtctctgcagtgcaccagcatcttgtgaagacaaagaagagaacctcccttgccattgtcctggaatccggggaacccagggaggtgcatgatttcgcggccctcctgggatatggcgcatgtgccgttaatccctacctggcccaggagacaatccaggagctcattgacaaccagatgctggataaggattattatgcggcggtgaatgattacaaccaggcaatccttgacggtattgtgaagatcgcctccaagatgggaatctccaccatccagtcctaccagggatcccagatctttgaggctgtgggaatctccagccaggtcattgacaaatattttacaggtacggtcagccgtgtgcagggcattactctggaggatattgaacgccaggtggacggccttcattcccaggcctttgaccctctgggtctggccaacgatcttacgctggacagcctgggcgcccataaaatgcgcagccagggtgaggagcaccgctataatcccaggaccattcatcttctccagcagtccacatggaccggaagctatgagagattcaaggaatataccgccatggccgatagagaaaatacaggcaatttaagaagtgtgctggatttttgctatccagcttctcccatacctttggaggaggtggagagcgtggacagcattgtgaagcgctttaagacaggggccatgtcctacggctccatttcccaggaggcgcatgagacgttagccattgccatgaaccgtctccatggaaaatccaacacaggagagggaggagagagccaggaccgtctggacagcgcaggcacagccacagaccggtgctctgccattaagcaggtggccagcggccgcttcggtgtcaccagccagtatttggtcagtgccagtgagatccagataaaaatggcccagggggccaagccgggagagggaggacatcttcctgccaagaaggtctacccctggatcgccgccacccgtcattccacccctggagtatccctgatctccccgccccctcaccatgacatctattccatagaggatctggcccagctcatctatgacctgaaaaatgcaaataagtatgcagatatttcggtaaagcttgtctctgaggcgggtgtgggcactgtggcagcgggtgttgctaaggccggggctcaggtgatccttatttccggccacgacggcggcacaggggcagctcccagaagctccattcatcatgcgggacttccatgggagctgggacttgcagagacccaccagaccctccttaagaacggactgcgcagcagagtgcgcattgagacagacgggaaactcatgaccggccgggacgtggctgtggccgctttgctgggagcagaggagttcggctttgccacagctcctctggtaaccatgggctgtgtgatgatgcgggtgtgcaatctggacacctgtcctgtgggggtagccacccagaatccggagcttcggaagcgtttccgtggaaaaccggagtatgtggagaattttatgcgctacattgcccaggaattacgagaatatatggcaaagctgggagtgcgtaccattgacgagatggtgggccgtacagagcttctgcagctatgtgacaaggctcctcagccaagacagggaaagctggacttaagtgcaatcttaaatcatccctggagccgtccgggacagaaggtgacctttcagccaaaagaccagtatgatttttacctggaaaaaactctggatgagaaggtccttctgaaaaaatgcagaccagccctggagcgtggggagaaagtcaccctgactctgtctgtgtctaatgtggaccgtacctttgggaccatcctgggctcagagatcaccagaagatacaaggacggacttcccgatcacaccattgtggtacactgccagggatccggcggccagagcttcggggcctttatccccagaggactgaccttggagctcactggggattgcaatgattactttggcaaaggactttctggtggaagccttattgtaaaagttccaaaggaagcctcctatccagcccaggaaaatattatggtgggaaatgtggcgctctacggcgccaccagcggaaccgcctttattaacggagtggcaggagagcggtttgccgtgcgcaattctggagccaatgcggtggtagagggcgttggggatcatggctgtgagtatatgactggcggccgggtagtggttcttggtaaaacaggaaaaaactttgccgcaggtatgagcggcggagttgcctatgtgctggatgatcaaaaccaactgtacaagaagatgaacaaggccatgatctctattgaaaaagtggaaaacaaatatgacaaagaagaactaaaggacttcatccaggcccatgtgaaggccactggctccaaacggggaacccagattctggaacatttccaggaatatctgcctaagtttaaaaagcttattccctatgaatataagagcatgcttgtactcagccgccggctggaggaaaaaggactgaccagccagcaggcccagatggaagcgttttatcttgaaacagggcaggagaaacttgaagagcgtatgggacggcagccataaaaggaggatgagaacatgggaaaaccaacaggttttttagaatacggcagagagactgcacaggtcattgaaccaaaggagagaattaaaaatttcaaggaatttcgcaagcccctgagcagagaaaagcagcgcattcagggagccaggtgcatggcctgcggtgtacccttctgtcagtcagggaccatactggggggaatggcctgcggctgtcccctgcagaatctggtgccggagacgaatgatctggtatacacagggaattgggaacaggcctatcaccgtctgagcaaaacccattgtctgccggaatttacttcccgggtgtgtccggccttgtgtgaggcggcctgtacctgtaatctgaatggcgagcctgttgccacaaaggaaaatgagcgggcggtcattgagactgccttcaaagagggctgggtaaaagcccagcccccaaaggtgcgcacagggaagaaaatcgcagtgatcggcagcggaccagcaggtctggcggcagcgcttttgctgaaccgcagaggccactgggtaacggtgtatgaaagaagtgaccgtataggcggcctgctcaggtatggcattcccaacatgaagctggataaatcggtcattgaccggagagtaaagcttatggaggaggaaggagttcgtttccttacaaatatggatgtgggcaaggaggtaaagccccaggagcttttaaaggaatatgaccggatccttctggcctgcggtgcatccaagccaagggatatccaggtgccgggaagagagctgaagggaattttctttgctgttgatttcctgggaagggtgaccaaggcgctgcaggattctgattttcagcaggtaccctatgagctggcgaaaggaaaagaggtgctggtcattggaggcggcgatacaggcaatgactgcgtgggcacggcaatccggctgggtgcgaagtccgtcacccagctggagatgatgccaaagcctccaaaggacagggcggaggataacccctggcccgtgtggcccaaggtgatgaaaaccgattacggtcaggaggaggccattgccctttttggacaggaccccagggtgtaccagactacggtgacagagttcgcaggcaataaaaaaggggaggtttcccaggcaaaaattgtggggctaaagccagtgaaggatgagaagaccgggcgaatgaatatggttcctgtggagggaacccagaaaagcattcaagcagatctggtccttattgcagcgggatttttgggaagccagccctatgtgacagaggcatttaaggtaaagacagatgcacggacgaatgtgcagacccagaaggagcagtatgagacaagcgtaccgggaatttttaccgcaggagatatgcacagaggccagtccctggtggtgtgggccatccgggaaggacaagaggccgccaaagcggtggatgcctccctcataggctattccaatctatgagtttatatcccagaaggcggctgggggttattatgtgcaaaggaaaataaggagagtgtattatggcaaattataccagagaagagatcatgaggatggtggaggaagaggacgtggaattcatccgcctgcagtttacagatatgctgggaattttgaaaaatatcgcaataactgccagggagcttccacgggctctggacaatgattgtatgattgactgtgcagatatcgccggggtgggagatggtgaggagtcggacatgtatctgtatccggatctggatacctttaccatacttccatggaggccccagcaggggaaggtggccagactgttgtgtgatatttatcattctgacaggaccccctgtgagtccagctgccgccagatcctcaagaaagtgtgccagaaggttaaggaggagggttacaccttttatgtggatccggaatgtgagtttttcctgttccacacagacgataatggagtgcccacaaccacaactcatgagaaggccggatttttggatctcagtccggtggacttgggagaaaatgcaagacgggatatggttctgactttagaggatatgggctttgaaattctgtcctctcaccatgagacctccccggcccagcacgagattgatttccgttacggggaggcacgggagatggcagaccgcctgatgacctttaaggtggccgtacgtacagttgccaaacggcatgggcttcacgctacctttatgccaaagcccagaacagatttaaatgggtctggcatgcacattcatttttccatatttaaggacgggaagaatatactcaccgatccccaggacccaatggggctcagccaggagggctattcctttatggctggacttttggcccatagcagggagatggcggccatcaccaatcctttggtaaattcctataagcgtttggtgccaggctatgaggctcccacacaggtgaactggtccaggaaaaatcccgcgtccattatccgcattcccttttaccagggagaggataccagaattgagcttcgcagcccggatgcggctgccaatccctatcttgtctttgcctgctgcattgccgcagggatggacggaatgaagagaaagctctttcccgtgagcggggtggaaaggaaaggacagaagccctccaagctggatcaggaggccaacagggaccagaacatgcctgccaatctcagagaggcgctgcaggagttagagagaagtatttttatgaaagaaaccctgggagaggaatttttttaccagtatgtgaaagcaaaaaagaaggaatgggaggcctattccagacaggtgacagactgggagttagaagaatatctgcttcgaatctgacctgagtgcctgtatgatttgtaagaaagttggaatgataaaccacatggatgtttgtttgacccagccagtgaggggcagtggaaagggttccttgccccagaggagcaggatagacaaaaacacagggcataaaggggagacggaggatgagcagcattgttattgcattgcccaaaatagaagaggcaaaaaaaatcaaggcgatcctggtgcgccgtggattttccgtgtcaactgtatgtaccagaggttcctgcgcactttcggccatgtcccggttagagagcgggcttcttataaccgcctgccgtctgccggatatgtcctgccaggagctgatggagtgtcacaggggcagctttgagatacttctcatgggaagtgaagccgctctggctttggcaccggcggggatgttgtctgtggtgaccccggtgcgggtgtccgatttggtgaatacggtggaaatgatccaggttcagctggaaagaaggctgaaaagggccagacagaagccaaagcagagaacctggaaggagcagaactacattacaaatgcaaagctgctgctcatggagagaaaccatctaagtgaagaggaggcgtttcggtatatccagaaatgcagcatggattccggaaccagtatggcagagacagcccagatggtcctcatgctgctgttggaggaagttgaataaagccatagaggtcaccgtgatccctgctttgtttttgaccatggcaatggaggatgagaaaatgatagatgtgaaagaaattgagagaacacaggaggatatatgggaaacactcatggcccaggagagtgtgggcaagaccctcaccctggaaggggcggtccacagtatccgtagaatgggggaggtggcctttattatcttaaggcgaagagaagggctgttccagaccgtatatgagaagggtacaggggactttgctgtccatgacctgaaggaggctatgactgtgcaggtacagggggttctcagagaagaagaacgggcgcctcacaagagagaactgacactgacaagtgtacagattctgtcccggcctgccagcccccttcccatggctattgacaaatggaatttggacacctccctggaggcaaagctgaatataagacccatttccctgagaaatgtgaaggaacgggccaagttccgcattcaggagggactggtgagagcctttcgggattatttatatgcccagggctttaccgagatacataccccgaagatcggtgctaagggcgccgagggcggagccaacatgttcaggctcagctatttccacaagcctgcagttcttgcccagagtccgcagttttataaacagatgatggtgggagtcttcgacagagtttttgaaacaggtcctgttttccgggcagagaagcacaataccaaacgccacctgaacgaatataccagtctggattttgagatgggctatattcatggctttgaggatgtgatgaagatggaggctggttttctgtcctacgggatgacctttttgaaaaaacaatataagaaggaattagatctgctgaagattacccttcctaagacagacagaattcccatcctgggttttgatgaagccaaaaagctggtatcccaaaaatatcacaggcccataaagaacccctttgacttggagccggaggaggagcagttgatcggccagtacgccaaagaagagtttggctctgagtttgtatttatcacccactacccctctaagaagcgccccttttatgccatggacgatccacaggatgagcggtacactttaagctttgacctgctgtttcgagggctggaggtgaccactggaggacagaggatccacgactattccatgctgatggagaaaattcgggcaagaggcatggacacgcagggaatggagcaatatctccaggcctttatgtacggaatgccgccccacggaggtctgggaatcggcctggaacggctgaccatgcagcttttaggggaagaaaatgtgcgggaggcctgcctttttccaagagatttgaacagactggagccttaaggaggacacagatggggaagattgatgaggatacaatggagaatgtagctgttctggccaagctttatctcactgaggaggagaaggaaagggccagagaggagatggaaaagctattggattatgtggagaaattaaaggagctggatacaggcagcacagagccccttacccatattttcggtgacgaaaatgtattcagggaggatgtagtcaccaatggggactgtcaaaaagagatgctggccaatgcccccagacaaaaagaggggcaataccaggtcccgaaaaccattggttaggaggcatcgtatggaattgacgaaacttagcgccctggagctctccgcacagatcaggcagggcagcatcagcactgccgatggagtaaaatctgtcatgaagcagattgagaagtgggagggcaaaaccggggcttatctggatatctatagaaaagatgcctttgcaagggcaaaggaggtagacaaaggaatcgcagacggaacctatcagggacctttggcaggtgtgcctgttgccgtgaaggacaatatctgcataaagggaaagaccaccacctgcgcctctaaaattttacagaattttgttcccgcctatgatgcggaggtaattcaaaggcttgaaaatgccggaatggtgattataggaaaaacaaatatggatgagtttgccatgggaagcaccacagagacctccgcctttcatgtgacaaagaatccctggaatttagaccatgtgcccggaggctcttccgggggctcctgtgcagcagtggcagccggcgaggcctacatggcccttggctctgacaccgggggctctatccgccagcccagctccttttgcggcgttacaggcttaaagcctacctatggcaccgtatcccggtacggtctggtggcttacgcctcctccctggatcagatcggtcctgtggggaagacggtggcagattgtgccgcacttttgcaggtactggggggaaaggacgaaaaggacagtacctcagtgagaagagaggacctggattttacaaagaacctgggtgctcccctgggaggaatgaaaatcggggttcccagggaatatctcacagagggcatcaccggtcaggtgaaggatgcatttatgaatgttttgaaagcctattcccaaatgggagcgattatagaattcttttccttagattatgtggaatatatgatccctgcttactatattatcgcctgtgcacaggccagctccaatctggaacggtttgacggggtgaaatacggcctgcgggctttagaatatgacggcctccatgacatgtacaagcgtacccgttccctgggctttggggaagaggtgaagcgcaggatccttctgggctcctttgtgttaagcgccggatactacgatgactattatttaaaagccttaaggactacaacgctcattaatgaggaattccggaaggctttttcccgctatgatgtgcttctggctccatccgctccctatacggctcccaagctgggagagagtctaaaggatcccctggccatgtatctgggagatatttatacagtggctgtgaacctgtgcggccttccggcaatctctgtgccctgtggtcttgaccaaaagggacttcccatgggtgtccaggtgattggcggtcttttccaggaaaagaaaattttgaaggctgcctatgcctatgagaaatatcgtggtaaaataaaattacctgcagaaggggggcagtcctgatgaacacccaatacgaaaccgtgatcggtgtggaggttcatgtggagctggccacgaaaacaaagattttctgcggctgctccacagaatttgggggtgcgccaaacacgcatacctgtcctgtttgcacaggtatgcccggttcccttccggtgctgaacaaaaaggtggtggattttgccatagccgccggacttgcggccaattgtaagatccgcccatactgtaaatttgaccggaagaattatttctatccggataatccccagaattatcagatttcccagctctatctgcccatctgttatgagggctggctggagattcctatgcctgaaggaaagaagagaatagggatccatgaaatgcacatggaggaggacgcaggaaagctcattcacgatgagtgggaggacagctccctggtggactacaaccgaagcggtgtaccacttatcgagattgtgtcagagccagatatgagaagcgcccaggaggtcctggcctatctggaaaagctcaggcagatgatgcagtatctgggagtgtcagactgtaagcttcaggagggttccatgcgtgcggatgtgaatctgtctgtgcgcccagtgggaagcactacccttggcacccgcacggagatgaaaaacctgaactcctttaaggccattgcaagggctgtccaggcagagcaggaaagacagatagagcttttaaaggagggcagggcagttgtccaggagaccagaagatgggacgacaataaggaagcctcctatgccatacgctctaaggaggatgccaaggattaccgttattttcccgatccggacctgccccctgtccatatttcaaaggcctggatccaagaaatcaaaagcaggcagccagagctgcgggatgagaaaatgaagcggtactccagggattacggtctcagtgcctatgatgcagggatcctcaccgagtccccccatttagcccgtctttatgaggagacggtggcgctgtgcaaaaatcccaagaaggcggccaactggttctcaggtccggttctgcgtctgatgaaggaacatagcctgcagccagagcaggtgcattttactcccagacatctggcagaacttatgacggcccaggagcaggggcaggtgagccctcagaatgccaggaaggtctttgaaaaggtgtttacagaggatgtccagccgcttccttatttagaggcccatggaatgaaaattctggaggatacaggacttttgcaggaaacggcagaaagaatcctgaaggccaatccgggaccgttagaagagcttttgggaggaaaggaaaaggtgtttggattttttctgggccaggtgatgaaggaaatgaaaggccaggcagatccggccaaggttcgggaatgcttaaaggaccttattgaagagttaataaaccacagttaacgggaaggagtcaaaaatttatggtaaagatcaatcaaaattatttaaagctgccgggaagctatcttttttcccagatcgcggccaaggtggcaaaatttcaggcagagaacccggatgcacaggtgatccgcctgggaatcggggatgtgacacagcctctggctcctgctattatacaggcgcttcaccaggctgttgatgatatgggaaatgcagatacctttcacggatatgcaccggatctgggatatgattttctcagaaatgccattgcgaagaacgactttcaggaccgaggctgtgatatttccccagatgagatctttgtgtccgacggtgccaaaagtgactgtgcaaacctccaggagatctttgatgagagctgcaaggtggctgtgtgcgaccctgtatatccggtgtatgtggacagcaatgtgatggctggccgtaccgggctttataataaggagagagagaactttgtggggctgatttatatgccctgccgggaagaaaatggatttctgccccagcttcccgtagaaaaaccggacctgatctacctgtgcttccccaacaatcctaccggagaggcgatatctaaaaaagagctgcagaagtgggtggactatgccaacgaaaacaaggcggtgatcctctatgacgctgcctatgaggcttacattacccaggaggagattccccacagcatctacgaatgcaagggagcaaagacctgcgccattgagaccaggagtttttccaaaaatgcaggctttaccggactgcgcctgggctatacggtgattccaaaagagctggaggcagagggcgtgtcccttcacagtctgtgggcacggagacatgggacaaagtttaacggagccccttatattgttcagaaggcaggagctgccgtgtacacaacgcaaggcaaagaacagatcaaagggcagattgcctactacatgagaaatgccaatatgatcaaggatggcctgaaggaggccggctttactgtgtacggaggtgtgaattctccttatgtatggctgaaaaccccagatcagatgacctcctggcagttctttgactaccttctggaaaaactgaaccttgtggggactcctggaagcggcttcggcgcccagggagagggctttttccgtctcaccgcttttggctcccatgaaaatacactggaggcagtgaaacgtctgaagacattctaaatacggttccggtttgggtactttttctacgttttttataagcacagatataaaattgtttatagttttgtcattgacatttcagaaaatagggcttatactggccaaaaaggaatgctaatccgataggtgaggctactataaggatacggactgctgccgcaaagtgatggagacatcatgagagggtcgaacaggctatatcgaatccaaggtatagcataatgcagttacactgccttataaagctaaagctcagacggtgcttttgttaagctgggattgtcccgcacactgtttgagttgtgcgggattttttattacatatgttataggaaagttctccgaacttgtctataacataaaaagccctccgggggatgcacccaatgtgccaaggaaagctgctttccaactgcacattggcgaacaaagctgatccccagctgtacattgccccactaagcaggattacaaaggaggtggattttatggaccctagtcctgaacgaagttgcagattacaaaataaggaatacagtcgttggaaatccacttttttacggcctggcagctaatgcccttggctctctttttcgtgagattttataaactgctgtattccctgaatatggcagttttttgttacataagaaagttctctgaacgatcctatgtaataaagacactccggggtatgcacccaatgtgccaaggaatgctgtttcgcagctgcacattggcgcacaaagctgccaagcctctcatgagtgaggggatgggagttgaagcgggcttgcctgcatttatgcccatggagcaggagagaaagctgatgaaggaggaagagccatgacaaaaaaagtattgatgaaattattgaaagataagaaatttaagtccattcatgaggttctgtcccagtataatccggttgacctggctgagcttctgtcacaattagaggagacacagcttgtaatggtattccgcatgctggacaaggaaacaggagcagaggttttttcctacatggataacgacctgcgccagaatctggtgaaatcatttacaaaacaggagatcaaggaccttctggataccatgtacacagatgatgcagtggatttccttggagacatgcctgcaaacgtggtaacccagctccttgagaacctggataaggacacacgggcggatatcaatcacctgctgaaatactccgatgacagtgcagggagcattatgactgtggagtttattgagcttcgcaaggacatgaccgtggccttagcattggagaagataagaaccgtggggattgacagcgagactgtatacacctgctatgtggtggaaaaacaccggcttttgggtatcgtcacggcaaaggacttgatgatccatcagtcagatacattgatcagtacattgatggaggacaattttgtggctgtccataccacagatgaccgggaggatgttgccaagctgttccgcaaatatggactgatcgccataccagtgctggacagtgaggactgtattgtagggattgtaacctttgacgatgccattgaggtgctcacagaggaaaccacagaggacatgcaccgaatggcagctattgtggagacagacgagccctatctgaaaacatcggtgtggaagcatgccaagaatagaatcatgtggctgctggttctgatgttttccgcagctatcacaggaagtatcatctcaaaatatgagagcgcctttgagatcctgccccagctggtggctttcattcccatgctaatggatacaggcggaaactgtgggacccagagttccactttgatcatccgtggatttgctgtagatgagctgcatttttctgatgccttccggattgtgtggaaggagctccgggtatccttggtggtggggatcgccctggcagccgccaacggccttcggatttggcttatgtacaagaatctttccctggcctgtgtggtttccctgtctttggcaggaaccattatgatagccaagctcaccgggtgtctgcttcctatggtggcaaaaaaatgcagactggacccagccattatggcagccccctttattaccaccattgtggataccttttccattgttatttattttaacattgccacagctgtattccatctatgagaatgggaaaagatgtgctaaaatagacaagaaccatttaggctgtggttctctgatcgtaactgtgaatcccagcccatttgagaagtaatgtatgaacaagcaacagacaggagttgacataatgaaatcattagtaatagcagaaaaaccttccgtggccagggacattgcccgggttcttcactgcggacagaagaacggcggggcgctggagggaaaggactatgtggtcacttgggccttaggccatctggtgaccctggcagatccggaggaatatgataaaaagtacgaaaaatgggagatgtccacacttcccatgatgccccaggagatgaagctggtggtgatccggcagaccgggaagcagtacaatgtggtgaaaacacagctttaccgcaaggatgtgaaggatatcattattgccacggatgcaggaagagagggagagctggtggccaggtggatcctggacaaagccggctgcagaaaacccatccgaagactgtggatatcttctgtgacagataaggccattaaggagggctttgccaacctaaaagacggaagagaatacgacaatctttatcacgcagcagtggcaagggcagaggcggactggctggtggggatcaacggaacccgggcactcacctgcaagtacaatgcccagctttcctgcggccgggttcagactcccaccctggctatgatcgccaagagggaggaagagatccgaagctttcagccgaaagaattttacggagttgccgtgaaggcgggaggaatcgactttacctggagagacgagaaaacaaaaagtctgcgcaccttccagaaggaaaaggcagacaaagtccttcaagaggtacagaataagaagatggaagtggtccgggtagataagaaatccaagaaaacccttgcccctggcttgtatgacttgaccacccttcagagggaagcaaaccagaaatatggtttttctgcaaaagagaccttgaatataatgcagcgtctctatgagaatcataaggtgcttacctatccccgcacagattccaagtatatcagcaaggatgtggtacccaccattaaggagcggctgaaggcctgctccgttgggccttacaagaagctggcaggtgccctgatccagaagcctattcagacaaatgcaagctttgtggacgataaaaaggtcagtgaccaccatgcgattatccccacagagcagtttgttcagatggatcacatgaccaacgaagaacgaaaaatctacgatatggtggtccgccggttttttagcgtgttctatcccccctgcgtgtatgagcaggttaccttggaaggaaagagcggcagtcacttctttgcagccagcggacgggtcatgaagagtctgggctggaaggaagtgtatgaacaggaccaggatgaggagcaggaagacaatgagggagagactctcaaaagccagaccttgccccaggttgaacagggggcagtttaccctgttgacgctgccaggctgacaacgggaaagacaaagcccccggccagattcacagaggccaccttgctgggagccatggaaaatcccgtaaaatttttggaaagccatgacgcacaggcggcaaaaaccctgggagagacaggaggacttggtacggtagccaccagggcagatattatcgagaagctgttcaacagttttctcatggagaaaaagggaaatgaaatttatctcacctccaaggcaaagcagcttctggagctggttcccgaggatctgaaaaagcctgagctcacagccgactgggagatgcgcctgtccaacattgccaaagggaaaatgagacaggatgcatttttgaaggatatccgaagatacacccaggaggtggtgcaggagatcaaaaccggggacggtaccttccggcacgacaatctcaccaacaaggtgtgcccaaactgtggaaagaagcttctggctgtgaacggaaaaaatgccaagatgctggtgtgccaggaccgggagtgcggctaccgggagacggtgtccagaacctccaatgcccggtgccccaaatgtcataagaaaatggagctgtatgttaaaggccaggaggagacctttatctgtgcctgcggttataaggaaaagctcagcgccttccaggcaagaagacagaaggaaggagccggggtgagcaaaaaggacgtacagaaatatctgaaccagcagaagaaagaggcaaaggaacccattaacaacgcatttgcccaggcattgtcaggtctgaagctggaaccctgaaagaggtgtccatctaaaaggcctgtacctataaaaggcctgtatcccatggagaaatcaggtgaaagaatgtttggaaggaaaaaaatcaagaaaaccacaggtacctatgacaaagagacctttgcgcctgtgatccggtgcagcatctgtacaggagagcaggtggcgggtttccgggataaggccacaggaaaatttcaggaagtatctgtgatcagaaccccagcggacctggaggagtttttggaaagctatgaagtaaaaagagaagaactgaaaaaagaatattaggaggagaaacaattatgggctatcaggacgattatcttctgcgcagcattcaggatacggccaggctgatcacgaaactgcttctgggagagaagatgccggattataagctccctgaaaagggagagaaaaccacagcggaccgattatatgagaaaatcataagtatggcggaccagggaaacatcaacgaggcggagaatcttcttttggaggagatggagtcccaggataaaacttacttggagctggctatgaccttttatcttcatctcaatgatatggatgcggattatctggatgagcacgattattccagggaggagattctggacgggattaagagcctggcccaggactggggagtgatcgggctggaagccttgtcttgaatatattaacttttgtaataggaagggattccctgtaaaataatggttagcatatcctaatcttgtgcttttttaaaaacaatttgacataatattgactaaattttaacaatcacatataattagcccatcgtgaaagactaatacaaaacattttttaccacgatagagcaaagctgacaaaattcacaaggaggatatgtaaatgcgagacgagtggacatcattcaatggtggaatctgggaaaaagagattaacgtaagagatttcatccagaagaattatactccctatgacggagacgagtcctttttagcagatgccacagatgctacaaaggaattgtgggatcaggtaatggagctgaccagtgaagaaagagagaagggcggcgtgctggatatggataccaagatcatttccaccatcacctcccatggtcctggctatttaaataaagagaaagaaaaaattgtgggatttcagacggataagccctttaagcgggcattgcagccctatgggggaatccgcatggctgtaaaggcctgtgaggacaatggctatcatgtggacccacagatcgttgaattttttacaaaacacagaaaaacccataatgagggtgtatttgatgcctacaccccggaaatgcgggcctgccgttccagtcatatcatcactggacttcctgatgcctatggccggggaaggatcatcggcgattaccggcgggtggcactgtatggagtggaccggcttattgaggataagcagcatcagaaggacactacgcgaattatcatgtactctgacgtgaccaggcaaagagaggagctctcagagcagatcaaggccttaaaagagctgaaggagctgggaaagatctacggctatgacatttcaagacctgcccgagatgttcaggaggctatccagtggctgtattttgggtatctggcggccatcaaggagcagaacggagcagccatgtccctgggccgcacctctaccttcctggatatttatgcccagagagatcttgagaacggaacctatacagaagaacagattcaggaatttgtggatcattttatcatgaagctgcgtctggtgaaatttgccagaactccggaatacaatgcacttttctccggcgaccccacctgggtgacagagtctataggaggaatggggattgacggccgttccatggtgaccaaaatgtcctaccgctatcttcacaccctgaaaaatctggggactgctccggagccaaacctgaccgtgctgtggtccaccaggcttcccaggaacttcaaacggttctgtgccaagacctccattgagtcctcctccatccagtatgagaacgatgatctcatgcgggtgacgcacggtgacgactatgccattgcctgctgtgtatcttccatgcgggtgggcaaggaaatgcagttcttcggagccagggccaaccttgcaaaatgtcttctctatgctattaacggaggcgtggatgaggtaagcaagaagcaggtgggccccaaataccggccgatcacctcccagtatctggactatgacgaggtcatggacaaattccaggatatgatgaaatggctggcccaggtatatgtgaataccttaaacgtcattcattatatgcacgataaatattcctatgagagagtccagatggctcttcatgacaagcaggtgacacgctggtttgccacaggaattgccggactgtctgttgtagcagactctctgtctgccattaaatatgcaaaagtaaagaccgtgagagatgaccaggggattgtggtggactatgagattgaaggcgatttccccaaatatggaaatgatgatgaccgtgtggacaacattgcctatgacattgtccatgactttatgtcctacattaaaggaaaccacacctaccggggcggaattcccaccacttccatcctgaccatcacgtccaatgtggtgtatggaaagaataccggctccacccctgacggacgaaagagcggagaaccctttgcaccgggggcaaaccccatgcacacccgtgacagccatggggcagtggcaagtctcagttctgtgtcaaagctgccctttagggatgcccaggacggtatttccaataccttttccattattccgggggctcttggaaaggatgaagccattttgtttgacgatatcacctttgagctggaaccagataaggcatgctgcgaacccaatgtaaccatacacgagaaataaatcaggaggataaattttatgaatatcagcgaagcacagattgacaacttagtggcacttttagacggatatgcagaaaaaggcggccatcacttgaatgtaaatgttttcacaaaagataccctgctggatgcccaggcccatccggagaaatacccccagcttactgtgagagtttccggatatgccgtgaatttcaacaagcttaccaaggagcagcaggatgaagtgatctccagaaccttccatgatggaatgtaagtctgggatggacagatgaatacaggaaggatccattccatagaaagtttcgggaccgttgacggtcccggaatccgtttcgtgatattttttcaaggatgtcccctgcggtgcaaatactgccacaatccggatacctggggagccggagggacccagatgaccgtggaggaaatcctggttctctatgagaagaaccgcagcttttaccaaaacggcggcatcactgccaccgggggagaacccttggttcagatggaatttctcacagaactttttaaagaagcgaaaaagaggggaatccacacctgtctggatacctcgggaattctctaccgggaaaacagggatgcacagtatcaggagctatttcagcaggtggacctggtccttttggatgtgaagcatggacttgcaaaggaacataaagacttgaccggacaggagctggagcctgtgcttgcctttgctaaggccctggagcgtgcaggggttcccatggtggtacgtcatgtggcagttcctgggatcacagacagcccccaggagctggaggctctgggcaggctgatcggaagattttccaatctcaaaggcctggaggtgctgccctatcataccatgggagtaaaaaagtatgaaaatttaggtattccctatcctctgaaggatgtggagagcatgacaaaggaaggcgctttggccgcccaggacatgatactgcaggcagtccgtcaggtgcgcaggaataaaaaacaagagtaaggaggcagcccagcctccttttttcttttgataaatgggaatggacttattccgcccatgtcatacaaaagatcttctgaatatgtcagatgtaatatgtaactatttacatgtaaaaattgtatgccaatcacaattttaaaaggaaatcctaggtcccagtaacagatattctacattttgcgccaaaaacttgagttgacggaacggttctcctataatcagctcataaaattcaatggccagtgaatgagaaaaagggctgtgtgtaggtaccacatacggctaaaaaaatggggataggaggtatgacctccgggagggtttattatgacattgtttttatgcattgcagctatcgtcatttccattgtaatcggatggaaattcaaattgaacacgggtatcatagccatggggtttgcttttgtcattggcttttttgccctgggtctgaaggtaaatgatattattgctttctggcccacaaccattgtattttacctgctttccattgcgctgttttttacctatgcaaccgagaacggcaccatggatgttttgggaaagaagcttctgtatgccctgggcggcaacgccaagctggtgccttttgccattgctttggtgtgtgccattgtagggggacttggtgcaggagcctccacaccggctatcatcggaccgtttgccttcctcattggaatttctgcaaatgtgaatcctgcattggtgtgcctttgtattgccttcggaaacctgatcggttctaataatccatataatggatatgggggtgtgatcggtaagaacctgattctggccaatggggtagatgaaggtaccacagtaaccatagcaaattactgctggataaacactatcattatcaccgtgatcattctggtggtgttctatattgccacaaaggcatacaaggcagaaaaggtaaaggtggagcagccgccgaaatttacccctctccagaaaaagacctttgtcatcatcattgctgcctttatactcatggtagttccaagtattttaaatacctggatgaagggcaatgaaatcatgggaaaaattgccgggatctgccagcctcagtctattatgattattggagccataatatgtgccctgatgaaactggcaccggagaaggccgtaattaaaaaaatccccatcaacaccattgtgatgattgtgggtgtttatatgctgattcaggtggccgctgccgcgggtctggttgattttatctccaatgcactgagcagctctattccgaaattcctgattccggcagccattgtgttctttgcggctttcttaagctttttctcaagctgtacctcaacggttatgccgctgatgtatccgctggttccggccctggcagcatccatgagcctgaatccggttatgctgtacacctgtatctttttcggcgggctgtccacagccgtttcacccttctctacagggggagccttaacgattgcaagctgtgcagacaatgatgtaaaagaagcactgccaaacaagatgatcgtggtggcgcttatctgcccggtgatcactatggtattggctaccgtgggaattttcaacattttccatatttgattttatcccaggattacacaggaggataagctctatgaagaaatatttttgcgtatgtttgatcctgcttatgataatacttatgggaagtactgtatttgccagtgaagttgtagtgggcggtgcggcggtaaacacagatgaattgaacgatgaaataaaggtcctttaccaggactatgctgcagaaccggagcaaattagatagtcccacacaggggcagatgtgattcatgcaaatcacatctgcccttaaaatttctccataaaaaagatggctgataacaaccatcttttttttcgttccgccaagtcaattgtctagactttccagccaggatatggggtgtgatctttgtcgaaaaagtgtgcccacaaggtatgccacacattgtactaaagttaaatagcgagtattattataggataaatttaacaattattcatctttatttgtggagggagggctttacattgagcttttgcggacttttaagtcattatgtacaccaaaaggatattcaggtagcttccatggcccagtactgccatacagaccgctccactatgtacaaatttctaaacggtaaaaggaatcctgcctccaggcggcaggtggagaaaatggcggattttatggagctcacaccttttgaaacaaagaagctgctggaagagtaccgtgccacctccatgggtacagacaaatactatggcagaaaaaatatcatagattttttgagagaatatccttgtaacatttcacatgacggggacctgccgttgctttcatcaggcgaggcaggccacggaaaggaaagcagtgtttttacgcgccttacggacagggatattccactacaaaataaaacagatatccagcaggctgtatatcagatgttgctgagggaatccttgcttcccaagggcttgatccgcatcattgcccagccatcgtggtcctatctgtttgatctcctccaatccttgagtacacatgggaagggtttagaaatccggcacattacctgtgtgaacaactcaaattatagagattttcagaataaggactgcaatattgccgggctgtatccgattttgtccgtgtttcagtcaggttccgcttataagcccaggtattactatgataatgtggattcacattttaacgatttaagtctgtttccgtacttaatccttacgtctgagtacgcccttgcctgttcctgggatgtacaaactggtattttatatcagggaacggagatactggagatgtttggtacgctttttgaacggcagtacaaggctgcttccgtctttttcaacagtgtacccagcgtgctggaatatatgaatattttacagtcgcagctacatatgggtggacttgcctgccatctcagtgcctgtccatgcctcacaagcctggcggatgaatatttgtataacaaatatgtggcggagattcctggacgtgaaaggattgttggcagtttgaccgcttactcggctttcttagagcggcagcagagacagggaaagcttcagacctgttttactatgaagggcttggaaagctttcttgaaacaggcagagttcaggaaattcccgcatccttttactgcccaatccttgaggaggacttcaggcgccttgtccagaagctttatgataaagccgctgccggatatgtccaactgctcaccggggccctggaaaatctttctccttacattgagtgtctctttactcccgaaaacggtatgatcattacaacagggaggaattacaaggtaaactaccttatattggatgaatgtcatttggttacgtcctttattgactgcttcactcatctgaaggaaatggagcttgtcgccagccgtgaggaaacactgtccaagctgggagagcttctaaataccttgtgatattatatgcggaaaggagaggaacattgtctgagttttcaaatatggtgaatgactatgttcaccaaaaagatattaaggtatcgaccatggttcagtattgcggcatagaccgctccaccatgtacaaagtgcttaacggaaaacgcaatccctcttccctgggactggtagaaaaaatggccgacttcctaaaactgacgcccttggagcggcagaacctgattgaggcatacaggatatccgtaatcggttccaacacctattaccggcgcatgaacatcctgaatcttctaaaaacgtatccggagatagaatcctgtggtgagcttgcgccttctggcaggcttgcatctctgccatccgtagattttttcggaagcgccacggactgccctgctgagggaaaagccaatatacagcgttttctgtatcagattctactgaaagaatcgcaaaggactgacgggcagattcagattgccgcacagccatcctggaactatctttttgatctgcttcaggtgatgagctataaaaatgacagcttggaaatccggcatatggtttgtatgaataacaatgtcaatgcgaattataagtatgaggattacaacatttcctacctgcaccagcttctacccttgtttcaatcaaacgcacactatatgccgaggtattattatgataatattgattcccatttccgtaatctgaatatgctgccttactgggtgattacctcggagcatgccctcaactgctccagcgatatacagcacgctatattttataagaatcccagaaccgttgccatggcgaagaacatattccgccagcagtatgagacaacctctgtgctttttaatgagctttctcagaagggcacggaatatctttccatgatgcagaagattcttgggtcaggccctgcctggtctgtaagtccgtggccctgtctggcctttgtttttgacagaaccttgtgtgagcgctatgttatcttggatttgccccgacgcccggaatttatcgagacctttatttcttattcccggcagttgaagaagctctgccaaaagcatctgattaaaacctatttcacccaaaagggcatttcttattttatggaaacagggcgtgtcaacgatattttctttaatttatgtactgagataagcatgtccgacagaaagaagattttggatgcattcatgaaatatgcggcttgcggccaagcctgcctgctgaaaggcgaggctgagacacttccccttaacatagcctgttttgccaacaagcatacgggagtgttgaggactgccgattctgataacgagtatatttacctgacctttcaggagaaaaacaccttcgattcatatctggacttcatgtctcatctggaggatatgaatatgaccgccagtccggaggaaacctgcgaatacctgggggggggggggggggctcggcgaaaaatattgagatgctttcgcctggcaaaagcccgaatcatattatggggtatcattttaggatatacgattattgtgaaggaggtgtggcacatctatacgattgtagatttaagccttgctgctgtcaaaaaaatgaattgtgagaaagggtgtgtaaaggatgaggatacataaaatgaaagtgaataaggttttaacagaagtagttatattggtattattttgcagtatatttactgcttgtggtaaagaaaaagcaggggcagaagataaactggtaggaaaatgggtatctacttatgatgatcaagaagtcattatctttaatgatgacggtacatatatgtacacaacagcaaatggaaataatgcaaatggttcttataaagtgtccgataatgaaatacagatgacttctgaagcatccggattgaatgcggatttgaataaggtaagtggccttcacaaattcactttagatggaaataagttatcattttctgcgttaggtcatgcctctacagaatatgaaaaataaaaggtagaaatagataagaaacgttttaagtcagcagcttaaaatcagaagagaaattcattaaaaaatctgtccacaaagtatgctacatattgtgatgaagagaaattattagtatcatattagctatagattatgattgtcagctatttaatggatgaaattatttagaagttaaggggagggagagaaaagaatggatgagttagatttagaactggaaatcgaagaggaaaaagatgataaaacggccaatgagccacaattagatcagccaactttaggacctgttattcagggaggcgcaaccacaaatgcagatattgtctttgttatagatgcgaccgctagcatgggtccggtgattaaaactgttaaagagtttacccttagtctctatgacaaattgcaggaaggaatgaaacgctatcataaatccttaaatcaggttcgggcaaaggtgcttgcgtttcgggattattactgcgatggggaatatgccatggaagaatcagatttcttctatttgcctgatgagaaagagaaattcagagactttgtatcaaatatagaagcaaagggcggcggagatataccggaaaatgctttggaagccattgccttagccatgaagtctgactgggtaaaggaaggaacatccaggcggcatattattgtgctttttacagatgctccagcccatcctttggaaaaggctaaggatggaattcccgacaactatcctcctgttatgtttgaatcatatgaggatctgtatgcagcttgggggaccggtcagggaacttgcatcgacaaagattccggcttcaaaatggatatgaaagccagaaggttagttttatttgctccggatgcttatccgtggaatcaaatggagaatgaattcgaccaggcacttgcgcagcaattaaggtcagataagggtggagaggaattaaatgatgatttaatattaaatcttttgtgtaaatctgtaaattaaatatagctgtgactgaataaaaatttcacaaagaggatgaaaatttctttcatcctctttgtatttgaaaatgaaaggataacaaatttgaataatttcattgtaaatgaaccaatatcaggagaagatgctgttccggttgccaatgacagaatgctgattgtctgtgatggactggggggcggcggaagcagcattcatatcgttggggaaaacaaatatacaagtgcacaattggcttcccggtatgtcagcgaggcagtgcagagctatgtggataactattatgaggccctttttgaaaacacagattctgaaataatgaacctaaaaggttttatttttcagtaccttcaggaaaaaataaaagagtatgatttgaaaaagaccgtacggggagctgctattaagctccttccaaccactctggcttctgtaatctataaggaagaggaggatcatgtggaggtgattgcagtatgggcaggtgattccagaatctatatgctgacacctgagaacggattgcaacaggtctctctggacgatgcggccggtgaatttgatgcataccgggatattggaaattccacaatgacgaactgtatatatggggaaaaactggagaattttcatttgaattatcgaaagtttacgcttgagaaaacaaaaaatctgattcttttttgtgcttcagatggttgttttgattatattagttcacctatggaattcgaatggtttcttctttatatcataaccaaggccaaaggcttgaatgaaaaaggcatttcctttattggaactttattggggaataatttgaagaaatattatcaccatgatgactgctcattggcagcaaaggtcttttttatgggagaaccagaggatttgcaaggagcttttcatgacagatatgagaaatatgtctgtgagaatcatcgtgtattgtcagtggcagtaaaagaaaataaggaaaatagtgcgaaacgtgatgagttttccatgaagctcggtaagcatatgaggactttcccggatcttctcaaggatacgattgtaagggggatgaaaagcgataatcttttagaagggcttcctttatatttgtctcagctccccgcttgcaaggattactatggcggatatcaggaacggaagaaacagatccatgaaatgaatcttcaatataaacagcttgtacaagagcagaacaggaaaatggaagaactatatccggttttttgccagctggtgtctcatgatattttgtataacaatagaattccggataatttgcggaaatttcgaagaaatattgaaatgatcaagagcaggatgaaaaccagccttcaggtaatgtctcaatctcaagaaagacatgaaaaattgaaagaatcaataacggccatgatggatacgtattggaatttgttttttcaaaaaaggggaggatttgaccagctggagaaggcaatcacgaatctggagggaagtttagaaaaaacttatcataattatgaaaagtattgccgcttttccgttcaggcagaagaaggacaggaggagttgatgaagctgcttgttccgtctgatgaaatgagggatttttttgtgaaagcatataaatttattgattttgacaatgctttaggggagaaatatgaaatacaggccaaggagctgagcaaagtggaagtgcaggccaatgcattaaaatccaaaatctcagaaatggatacaggctataatgcggaacagtattatcaacgggagaaaaagcagattgtggaacagctttttcagctttttccgcaaaccgttgagttcttttctaagggggaacaggaggctataaatccttatatttcctggagtgagggaaaaaggaagctggaagaaaaaatccaagcaagtaaccggaaaatggatgaaatctgggagaacggttacaagaaaaactacgaatactatcgcttcctatgggaaaacggaggacgagtttagtgaaaacagtgaatggatatatacataatgacgagtgggtaacaggcggcaatggaagttttgtgaaagccacaaataataaagaagaatattttctgaaaagatttcaggagcctaagtatcctccggatactgcgccggataatgtcaaaaagataaagattgaaatatgtcagaggtggttggaaaatagaaaggctgtaaatgctgctttaagaaaaatatctacaggaaatggaaatatcgtaacccccttagagattttcctggatggctcttattattgccaggcatcctattgggttgatatgtcttccgttccattggataaaatctcggattttgacgaaaagtccaagcttctgcttctaaaaacactggcggccagtatgcggaaggttcatagcgttaatatcgtacatggagatttgaaaccagataatattcttatcgtggagggaaaaaacgggttgatcgcaaaggtgattgactttgatgattcctatttttctggatatccgcctttgccggaggataccgtgggaacagaatgctattggagtccggagttagcatactataaaatttctcaggatgagaaatacgctaaaaatatcacatgtaaatcggatgtatatgctctgggaatcattttccatcaatatctggcaaagggaaggcttccggctatggacaaggattgcatgaatccttatcaaatgagtggaaaagggaaaaatctgaaagcggaagcatccattcggccgctttatcttcaaaaaattataaatcagatgcttaaaagccagccaggccagcggccctctatggagcagatacagcagatgctcaaagaaccggactctataccggagcttacacgaaggctttcaggggaagaagagcctgtggtgtaccagtatacaattatggctaaaagtaatctgcctgaggccgggaaaacctatgtaaataaaaatgaaaaagaagtttgtgtggagccgggagagagagtcaattttgaagccacggaaaatgcaggttaccgtttcttatattggaaaattgcaggaaaagatgtaaaacaaaaaaagttttcagtaaaagcagtgggggatttggaagcagaggcttgttttgaacgggtaatccaggagaaatttacaatatcaggaaactgcataggcggcggcagacttttgattaacgggaaggaaggctcctgcacagtaccaaagggagagaaggttcaagtagaggctgttgcagactcaggatacaaattttcaggaatggatgttgccggaaacaggataaatgcaaaaaaggttcgatttaaggcggtggcagatattttggtaaaagcagaattttctaaaagggaaataaatataggccccggggggctggagtatgaatggattaacggctcaaaagtaaaggtaactttgaaaagtgggagaacacaaactttagatgcgtatcttgctagagagatgggaatgatcaactaggaggtagagaaatggaacgggttgtactaatgaaagcaagatgtgaaaagacaaagaaagaatttgcactgcggtatgattttgcggcagatggcaagtgggtattgacctatggagtccttccaaatgaaatggaacaaatgaaccagggcggaatcggttcccaggaaatcaatataagtcaaaccaggactggcccccagtaccgttgcccctattgtggaagtttaagctatgttcgatgtgggagatgccacaaacttacttgttattccggaggaatgtttcactgtgcccattgcaataattccggagaggtaaagggtgtgattagttctctggaaggaaaaagcggtatttctcaatgatattgtacaaaaatgctttgctcattggaatacatcaaaatatggtgcagtttggagattgaaaatatgtataaaagtaaatttaaaaaggtgtgtttttttcttgctgtttccattattctgaatctttggtttgcaggacttcagtttgcttccacggcccagctaaatagagcagaggccagatgtaaggagctggaagcttctcataagaacgctcttttagaaaagcagcatattcagcaggagtatctgaatgaaatagaccggcagattaaggaaaatgaaatccaggaggaataattagaagagagttcattgaaccgtctggaatttagagaggaggatatttatgcggattatcagagtaatggatagtgatgaatatagcaattatgtgtggatgaagtttgttctagggcttataatgcttatttttgccctgtacatcttaataattgctctgagtgtaatatgtataggcaagattttcagaaagatgggatataaatggtggtacgccctgattcccgggtataacttctacatattattcagagatattctgggaaatggaaagctggcgataatttatttgggaagcttttgcgcaggaatagccagtggaataggagcaatttctatggggatagattatggtaacctgccaatgatgattgtgctgaccgttgtaatgtgtattttctttattccttttttctccatacatataaagtttaattattatttggcgaaatccttttctatgaatggatttttcggaattgttgctatgatacttcttattcccggatatatgatcatcgggcaattcggaaattatttgggagcttatgacccggtgtgactacgtaacggagattagaaattgtagatgatggaaatgttaaaatttaattcacaggactatgccatttatgcgcgcatttcccatatgcttaaaagaggggagtttacggtaaatctcccccgcacctgcagcatggaagagattatggcgatttttaaagctgccataggagaaaatccagaaaaaatccgatatgacacttgcagtatacgggtttcttccacttccttcaactataggctggagtccgcctccatatggaaaaccacagaaattcacgctagggataagatatttcgggaggagctacggccttttatcactggaacggcgggtttggacacttataacaaaataaaaacggtatatgagacttttgtgaaaaaggtaagatatgtggacagcggaagcttgggacatagtgcatggggaccggttgttgaaaaatgtggcgtatgtgagggaatcgcattggcatttggagcagctatgaaagaaataggagtttcctgttgtacaatatttggaagcttgtcccagagcggcgttccggctcaggaagaaaatcatgtgtggaatctcatacgcatcaatgggaattgttatcatgtggatgtgacagcggcgataggtatttacagcggcgcagggaaaataagctatgattatttatgtgtttcagataagacgataggccgcgatcataagtggtacagatcttggtttccggcatgtacaagcgaggacttcaattgctataaaatgcagggattgtttattgacagtgaagaaaaagaaactcatttaatccgtcagtatatagaagcggataaaagagttttgcagataagctatgggaaagatttctgggatgcctttcacccggaaaaccggattctggacaaggtaaggaggattttagaggattatcacatatattctgaacaattatctgtcaatataatagaggaaaaacaatgggttgaaatcatgcttcctcgatctatgaagagcataaaacctgtaagtggggttgacacagatagcaaaaaaagaaaaaaaatcagaatacaattccagtcgaactctccttttatatgtgagggagatgcctttgtaaatatgttcaatacgcaggaacaagctaaaccttgcaaaaaagaggtagcaactgtgggacaaaaggaattacaggcacttcgaatgggacatgccctaatttcaagggcaaacaatggaagaaatcaatacttggtttatacaaagcttcctgacagaagccttaacctagaaaatgcaaaaaaatgcttgatgtgttgttttcataattccataaaagcggcagatgacaagaagtgcagaagtattatttttccatgtttaccccgcactgaagtttggcctcctggggaagtttatatccgtacagctgttcaaacaattttgtctgccctgaaacaggcggattatgtggagattttgacgctgacaggagaaagctgtatttgtgaaaagtataagaagcaaatgaaagagctaaaaggagaaagtaaataatatagacttaagaaacagaggtataataaatggcgtggtgggtatgtccggaatgcggaaatgaaaatgaatgtactaacacaactgatattactggcatggaatgtgaggtgtgcggagagcctctgacggaagaattacttttggacgctttaagaaaagaagcgataaagcagcttctggaagtgagaagcaaaaaagtaaatttgccggagagttcccgggataaaatttctaagatatttgatgccgcccagcaaaaattgaacgcaactgagacaaccagtgcgatggaaaaaattgtgtcggaaacatccgagaaaattcttgaaattcaaaatgaaaaaccaattgttactttgccggttaaagaagttgagaaaaaagagaagctaaaaccgagttctgatccgaaaccaactctaaaatatagagagcggtcagaaatcataaatgcgattccgaaaatcaaggatagggatcggaaatattggataatgggaacggcaatttctttattggttggaatattactcttatctgaagcttttacaagtatgaagtataaaaacagcaattatgtgagcgcaggatcagtaaatattgagcagaacaatacttggcagcaggaaaaagatgattctgacgattcggacagaggttatagcgattcggacagagactatagttataatgactcagaaagtaacagcgattatgacggtgaagaggaactggtggagcctattactgaaaaagaacctgaaaccagcagcgattctgagatttctatgattgattcttcagaggcggatcttagcggatgttctctggtaaaaattgtgtctacggatgcatcctcgataatttctcaagaaggccatgataattctcctataatggcatttgacggagatgagaccacaagctggcaggaaggggctgacggccctggaattggggagagtctggctgcatattttgatcgggagtacaaggtaaagtatatttttctgaagctgggaaattggaggagtatggaatattattatcaaaactgccgtcccaaaacggtgaccatatcattgggtgcatattcagaaagctttacatttccagataagcaaaaggagtactgcatttcatttcctgtaaatacgcctgcttttaatattcgtattgatgatgtttataagggtacagtgtgggatgatacagtaattgcagatataaaaatctatggatactaagtacttgacggataaagggaaggaattataatgaaggaaggaaaaaagattgatttaaaaaagtttgatatcaaaaaaattgacataaaaaaaatttatcttataattactattagctttttctcaattctattaggcattgcaatattttccacatattatttatctaaattaaaggatgaatttaagaacaatcaagagatatatacaaatgatatatctgagcttcagactggcggttctgttcttgaagacagtattgaaaagaagaatgttcaattggacatgcttttaaaacaggttgcggcagagcaggaatcagaggacctggaaccgggaaatcaggaaatggacggccaggaagagcgggatttactttttgaaaaaaacgtggaaatagcggatttagaggcaggagttcttgtagaaggtaaagatatcttgaagggaaacctatcgcagtattttaaggcatatgaaatacaggaaggggatgctgtatataaccggattataggaaaatcctattatgagaatccggacataggcctttctgatttgcgctatttgaaaatgcttcattataattttaaccatgaaattcaggtgggcgaaatgatagtaaatacggatgtggctctgaaggtgcttcagatctttgaagaactgttcacaaagggctatgaaataaatactatgtatttaatagacaattattggacgggagatgggatcagttcggatacggcttctattcaggagaataatacctccgcattctgctatcgctattccacggcggacaatggttcattatccaaccatgcatatggtcatgccattgatctcaacccccagcagaatccatacataacctatgatgcccagggaacgccctacacgttccattccaatgcagaaccttatattgacagggaaggcggagatccacatatgattatcgggggggacatgtgttgccaaatatttgaaaaatatggattttcatggggaggatattggtccaatcccgttgattatcagcattttgaatctgtttattaagtagttcctgcacaaaaagctacggcggcagagtgtgaaaactctgtcgcttttcctttttcggaaagtcctatgaaacggttcccagcactcacattctgttccaaagctcaaaagaatatcatagtggtattcgttctctcagaaagaaacaattaggtgttgggattatcaatgtcccgtttgtctggagcgctgtccgaaagtctgcatgaatattcttgcacaactgtaccgtaattccggaatactgagtaccgacgttccgaacgtggataccggcattgattggcttgattgctttgctcagaatttgtagcaatgtcaagcccagagccgctttgcggtgcatagcaggcttgacattgctgcgaattctgagataatagcgaaccccaatcaggcattttactgcggtactctatgaccggactgccgtccattttgttccggaatactcactgcatcggaagaatctatacacgcagggataaattcagatgctcttcgtaatatcgcgtgagctggcaggaaaagagaagaatttccatggtctttccatcgtccaggtccacgggaaagagctcctgtattttctttaatttattcagcacggtatttctgtgcatgtacatcatttcggcagttctacttacgcttcgcccgcttttgaggtagaaatacagaacgtccctgagattggtattgtgctgcttgtcatagcgggtgagagtgaccaccgcaggtgcggccagaaggacgatatcactgtttccaagcacacgctggaactgctcggcaaccatgtcaatgaccagatagatggagtaatcctcataaaagatcacatttttataagggttggcaatactcatggtgcgcagcaccttattcagccgtctggtgagatagtacaggctgcggaaggaagcgaacaccttggttgcattggaaaccacggcagtggcatgaaattggtccagcaaagtattccacttgttcagatccatatccttgggcagcttatattcctgcaggtcagagctgtgcacaatgacaatcttctttttccagatagtcatattcgtatttggcagcaaaatggaaagctggcttaaaagcagttcataggaagaattaggctgtgtctcctggaagctgatgataatacagcggatgtaggttttcaccggaaagggcatcatgcgtatgcggtcccggacttcaatggtgcttaaattggacacactggagaagtcgttgagaaggctggccagatgattgccggagatggttaagtctgtgctctgctgggaaagaagtggacgcagaagcccggacatgtggttgatcatatccggaatatccatatggcaggcatagtcatcggtaataaacatcagggtggcaatatctgtgccctggtatctaatattctgcaggtagtactgatggtctgattccactggacagagatgacggacctcgttttcatataccggactgtatcgaaagccggacagaagcttctgggtgctgtcataagacaggcagccagtagcttgaacctctttggcataggggtccataaaataattctggctggtcatctcaatcacatgcattccgggatttaacaaaagaatgtgcccctggaggatttttcccgccagctcaataatatgagacagtcccttctcctcacacagagcactggttaaggttctgtcccattctgtgtaggagtacaggatccgattcactattccatagagctcaatgatgggaagctctgtgacaatgagattgatggtggttttcttaaaataaggattcaggcagggagaatccccggacagaaaaaaggtggtgcgcatgtctttgggaagtgcttccagcaccggctgggcatagcgggcctctcccagatacagactgtggccgctggcatccacggaatgtgcatctggtccaaataaaacaatgttgttgatcttcgccagctccggataacccacatgttttcgtattaagctttcttttagatgtttgagaaaaaaggcaatgtttggcatactttcgctcctttcagaaaatgccggatagttatctgtcaattattgcattttattatagcattttgtgaaaaagatatcaagtaaatatgtcaatatttacatataaacgtgaagacagaggactgccggatgtctgtacataaagtgaaaggcgcgtatctgattgtgcgaagtacactttcatgaaaagtagaactgtgcatttgctacagatatgggcaatctgaggaggttatattgaaaaaggcaaaagagtccgttaaacttgcccataacagaagaaacacacaagtctcagggggatagcaaaggaggaaaaaaatgaaatactcagaaaaagaattaaatgcagttggaacttacacgccggagggaatcgcggcaaaggagattataaaatttgattcacccatcacgccaaaggaaaattacatgcgtatcttccgcagggagaagccggaatggattcccatgtcctgtgacaccatcaccttttgtccaaagatcattccggacaacattgcccggggatgggtcgtggaggcagaagggctggagccgggccaggagggtggcaaggatatgttcggaattgaatggacctatgtgccaactgtgagaggctccatggtaatgcccggcaaccctctaatggaggatgccaatgaatggacagagaagatacaatttcccaatctggatgactatgactgggagggctgtgccaagcgcaacaagggtatatattttgacacagaccgtcccacctttacctggatcatgacaggaatgtttgagcggctgatctcctttatggatatgcagaatgccctgatcgcccttatggatgaggatcagcaggatgcagtaaaagcgcttctgtccaggctctgcgatttttatgatgatcttattgaccattaccacagatatttccatgtggatatcattcattttcacgatgactggggcagccagagggcgcctttgttttccctggacacctgccgggagatgatcgccccttatctgaaacgggtggtagatagctgccataagagagggattatctttgatttccactgctgcggttttaatgaaatgctggttcccgcaatgatcgaggcaggagttgactgctggggcggacaggcggtgaatgattttgacaagctcaatgaacgttatggagagaagctggttattggcgttttgttaaatgtatctaagacaaaccaggaactcacccaggagcaggccagtgaacaggccaaagcctttgtggaaaaatatgccccaagaatgccggaaaaacccgtgatcgccatcctgcgcagggcggatgagaagctgcgtacggcaatctatgaggagagccgcaaggttctgggctaggcggcagatcgcatatggaagaaaaaggaatcatatttgatattcagcattattccatccatgacggaccgggaatcagaaccaatgtgtttttaaagggctgtcccctgcgctgcctttggtgtcagaatccagaatcccagtctgtggcgccccaggtgatgtatcaggtatctaagtgtgtacagtgtggagcctgtattttggcctgccctaatctggctgtaaagcaggggtacaattgtgtggttacagaccggaagcgctgtatgggctgtatgagctgtgtggatgcatgtaaacccaaagcccggaccgccgcaggaagaaccatgacagtggaggaggttctgcgggaggctgcccaggataagctgttctatgaaacctcagggggcggcattactctcacaggaggggaagtccttgcacagccagagtttgccaaagctcttttaagaagggcgaaggagctgggaattcacacagtggtggaaacctgcggatatgccggatgggagaccataagagaaatcctggaatatacagatctggttttatacgatgtaaaacacatggactctcagcttcacaagaactatacaggggttccaaacgaaaagattcttgagaatctcacacggatatcccaggagttaaaaaaaccggtggttgtgagaacacccatcatacccggatacaacgatgacgagaaaaatatgcgaagcatgggagcattcctggcagcccaggtgcctacctgtgtggaggtgaatctgcttccctatcacagcatgggagagggaaagagggagcagcttgagcagaatcgtcccggaggtttttcagcagttcctcccagcgatgagaaaatggaggaattgagaaggattctttcccaatttgatatctcagtaaaataaagcatacataaaagaaaaaaattatgccgcagccattaaagctgcggcattgtcatgtcatccagcaagccagacaccgcttgttcatactcctttgggatggattccccataataagaaaggcagcggtaaagccagatcagataggttttttcacggatgatggcaccttccagaaccatataatctccaaattccggacagcccggcgtgcagtccttatacagaggatcctttcgattctgctgaagctggcacaggcggaagctgtgtttttctatctgtgattttagaagatgagtaaactgctccggaggacagaactgagaaaaatatgtacgcagcctgaaaatatccttgggtgtgatgccaaggtcttcatcctgagtgagccattctaggaattctttttttccggcaggagtgatggtgtactgctttttctccattttctccccctggatgaccacatcataattgatcaggccttcctcatggagctttttcagttccgggtagatctgactgtgggtggcataccagaaattagagaaggcctggtctttaaattccttggcaatatcatagccggtgcggggctgctgataaataagacctaagatagcatatttcagtgtcctcatacatagtactccatttctatcgtttttcatattttagcacaaaatcccaatattttctacgactgaagagaagaaataaaacttgtgcctggtgttgaacccatgtgggggatgttatgcagatcatacaaacatataattataaacatataaatatagacatgttttctggcccgatgatagtataaaacaaaagctaggaacaagcggtgaaggaggtattttgaatggcgaaatttatcactgccggtgaggcggcagctttaataccagatggggccacagtgggtgtggcgggaatggggctgtccggatggcccgaggagatcgcggttgccattgcagattcctataaggagaaaggccatccccggaatctgaccatgaagcagggaagcgcgatgggagactggaaggagcggggaatgacaagactgggatatgaaggcctgatcacccactggtcagcagcgcacatcgggtcagcctttgccatgaatgatctggtgcgtgccaataaaatgtcctgccactgtcttccccagggagtcatcgtgaatctctggcgggagatcgcagcccacaggccgggcctgctcacaaaggtggggctgaagacctttgtggatcccaggctggaaggcggaaaaatgaatgaggccacccaggaggacctggtggagctggtagagtttcagggagaggaatacctgttctacaaagccttccctcttcatgtggcccttttaaggggaactactgcggatgaggacggaaacatcacctttgaaaaggaaggtcctatcaatgaagggctggccgtggcccaggctgccagaaacagcggagggattgtgatcgttcaggtggaatatacagccatagggggaacacttcatcccaaggatgtgaaaattcccggagcgctggtggattacgtggtggtggccaccaacaaaagtgcctgctggcagaccgagggtgtgtattacgagcctgcctttgcaggaaatttgaaaaagcctctccacgcactgcctgagattcccctgtgtgacaggaagattatccagagacgctgtgccatggaattaaaaaaaggcaatgtggtaaatcttggtgtgggaatacctgcggatgtggcaggaatcgtagctgaagagggatgctcagacgagatcatcctcacaaccgaaagcggcgcttttggaggcgttcccgcagcccttcctaattttggaagctcctataatgcccaggccaatgtggaccatggctccatgttcgacttctacgacggaggaggagtggacgtggcggtgctgggacttgcccaggcagatgaaaaaggaaacatcaatgtgagtaaattctatgtccccgggtttggttataagatgatggggccggggggctttatcaatatttcccaaaactccaagaaggtgattttcgccggaacctttatggcaaaggcaaaagaagaaatccggaacggacgcctgtgcatcttgaaagagggcagcgggaaaaagttcctgaagcaggtagagcaggtgactttttcaggagagttcgcctccagcgccggccaggaggtcttatatgtgactgagcggtgtgtgctgtggctgaaggaggggcggctggagcttgtggagattgccccgggtgtggatttggagagagatattctggcccatatggaatttcagccggaaatatccaaggatttgaaagttatggaaccagccattttcaaggaaaagtggaatggtctgaaagagatgatgtaaatggagaaacatgcacctgaaatgcagacagtggcacagcttctgcacagacgcacacagctcacccctcttcgccccgccattatagacaggggacgcacggtgacctggcaggaggttgaccggtactcagattccatagcagtttttctatggaaaaaagggatccgaaagggagaccgcgtggggatcctgggaaaaaactcccttctatggatcctgacttttctgggaattgagaaaattggagccctggcagttctgtacaattatatgctcaccccaaaggaacagaaggacctaatggaatataccagaccctgctgtgtgtgtcttcctgataaaaaagagagaaggaatgccgttttcttccttcatggctgctatgtggaggaagaggagcttagagaggccttgcagcagcctttgtacctaggggaagaagaactactgagagattgtgagaacgcggtaagtccccaggatcctttggggatcctgttcacttcaggcaccacctccagggcaaagggcgtggtgctcaggcagggcccggtggtggccattgcctgtgagacggcaggacagcttcagtggaccagccaggacagagcctgtatgccgctgcccttgtttcactgcttcggcttgtccgcaggatatctggcctccattgccagcggacactgcgtctgctttctggagaataatcgttccctggatatcctaaaagcagtggagaaatacgaatgcaccatcttaaacggagttccatccatgttcctggccatgatgaaaaaaagcttttttaaagattttgacatcaattccttaaaatccgggattttggcaggagcccctgtatcccagaaggaatacgtggaaatctgcggcgcctttccttttcaggtgttgtccatgagttacggacagacagaggcctcacccagcatcaccttctccccttatgaggacagtgtgcaggtgaaggcaggatccgtgggcatctgggtaaaaggaacacagggaaagattatttctctcaaagatggaaaagaccaggagctcctgaaggagggggaggtggctgtccgggggtaccatgtatgtgcgggatattttgaaatggagcaggagacaaaagcggccattgatgaagacggctggctgcataccggagatctggggtatgtggaccaaaagggatacctgcacattacaggaagaaaaaaggacattatcatccggggaggtgaaaacatctcctgcagagagatagaggaggtcctggaaggctgtcccgggattgagaaggccaaggtgctgggagtaaaggcgccggtccttcaagaagagattggggcctgcatccaggaagcacagggaagctgtgtggacataggggaattgaaaaagtatctgaaagaaaatttagccagctataaaatacccaggtattttgtgaaaatagacaagtttcccgtaaccacaaacggaaagataaaggtgggtcggctgcgggagctgctggaagatcaatggaagaaaaacagggaggaagaattatgagcaatgctgtaaatgaaatgtttctcacacaggagcatttgatgatccgcaagctggcaagagaatttgccgaaaaagagcttaccacagaggtgctggatcaaatagaggagacggaacagtatcccaaagaaatcctggataagatggctaaggccggatttttcggaataaagattccaaaggaatggggaggggcaggctcggactgcagaggttatgtggctgtcatggaagaaatcgccagagtgagcgcagtgagcagcctgtatgtatccgcccccaactcactggcaggaggaccacttcttttgtcaggaaatcaggaacagaaggagaagtatttaggacctgtggtccggggagaaaaggtgatcgcctttgccctcacagagcctggagccggttccgatgcaggtggaatgaccaccatagccgtggaggatggggaagactacatcctcaatggaagaaagacctttatcactatggcgcccttttccgattatgcagtggtgtatgccaaaacagatatgagtaagggaagccgtggaatatccgcatttctggtggatatgcgccaggaaggcgtgtcctgcggaaagtgcgaaagaaaaatgggacttattggctgcgggaccagcgatattattttagataacgtgcgggtgcccaagggaaatatgctgggagagaaggacaagggtttttccaacgccatggctaccctggatatcggacgcatcggcgtggccgcccagtccattggcgtggctcagggggctctggatgaggctgtgaaatacgccaaggaaagaaagcagttcggccgccccatcgcaaaatttcaggcaatcagctttatgctggcggatatggccacagagctggaggccgccaagcttcttgtgtaccgggctgcctatctcacagataagaagaaaaacgccagcaaggaggccgccatggccaaatactatgcgtcagaggcctgcaaccgcatatgcgcaaaagccgtgcagattcacgggggctacggctacatgaaggattacaaggttgagcgtatgtacagggactgccgggtgtttacgatttttgagggaacctcccaggtacagcagatggtgatttcccgtcagatcttgaaatagaggaaggagcaaagacagatatgaaaattatggtatgtgtgaaacaggttcctgataccacagaggtgaagatcgacccggtaaaaggaacattgatcagagagggtgtacccagtatattaaatcccgatgatgccaatgccctggaggctgcccttcagatcaaggaccgcgatccggacacccaggtggaggtcatcaccatgggaccgccccaggcagaggaaatgctcagagaatgcctggctatgggagcggacagagcttatcttctcagcgaccgtgcctttgggggagcagatacctgcgccacctccaccaccattgcggcggggattcgaaaagcaggacccgtggacgtgatctttgccggccgtcaggccattgacggggataccgcccaggtagggccacagattgcccagcgcctgagaataccggtggtaacctatgtgcaggatatccaggtgcaggaagaaaatctggtggtccagcgtcagctggaggatggttatgaaattgtccaggtggggatgccctgcctgatcactgcggtaaaggaattaaaccagccccgttacatgaccatctcaggaattgtggacgcttaccgccaggaaatcactgtgtggaaccatgaggatgttcttctggacccggaaagctgtggcctggccgcatcacccacccaggttttccgctcttttacgccgcctcacaagggcaagggagagaggctctcgggaagccccaaggagatggcctttgaggttgtgaaaaagcttagacacaagcatgcgctttaatgcgggaagggagaggaaaagatgggtattaagataattaaagagaattgtaagggatgtaaaaaatgtataaaatcctgcccctttgaggccattacaatggaagataagacagcagtcatcggcagtgcctgcacaggctgcggccagtgcgtggaggcctgtaaattccaggctatagaaaagactcaggagaagatcaatggagtggatgtgagcctgtatcacggcgtctgggtttttgcggagcaaagagaaggcagactcatgcctgtggtcatgcagcttctgggagaggccagaaagctggcggatgatctgggcacagagctgggggcagtgctgtgcggttatcaggtggagggtttaagtgaagagctattcgcctatggtgcggataaggtctacctggcagatgccccggagctggaaacctacaccacggatggatatacaaaggctatttatgaggccatcaaagaatataagccagagatcgtgctgtacggggccacccatgtaggaagagatttaggcccggcccttgccgtaaaagcagggacaggactcaccgctgactgtacaggattggagatcaataaggaaaacagaaatcttcacatgacccgcccggccttcggaggaaatctcatggctaccattatctgccccaaccaccggcctcagatgtcgaccgtccgtccaggggttatggaaaaagcggtgcggatggagggaaggactggagagctggtgcgccttaatccagtgtttgcccagggagatatccgcacaaaggtcctggaagttgtaaaatccttaaaggaacaggtctccctcacggatgctaagatcattgtgtccggaggcctgggcctggggggaccggaaggctttactcttttaaaggagctggcagacaagctgggcggggtgatcgcctcctccagagcctgtgtggatgccggatggattgagaaatcttatcaggtgggacagacaggcaccacagtaaagccggtgatctactttgcctgcggaatctcaggagcaatccagcatctggccggaatgcagaattcccagtacattgtggccattaacaagaatgaaaatgctccaattttcgaggtggccgattatgggatcgtgggagatctttataaggtcatcccggagatccttcaggccctggatgcataggagtgaggctatgaagaagattccttcctggctggtggcagtcagtgactgtgttttactcttattcctggggctggtgtacgcctggagcgtgtttaaaaagcctctggccggcgagtttggatggagtgacgggcagcttacctggacctttaccatctgtatgtcctttttctgtattggcagctttctggcagctaagctgacgaaatacgtgaagcaccaggtggtcgtcattgcatccgggattctgatctttttggcatttttgctggctgggcggatgacacaattgtggcagctttatgtgacctatggagtgatgatcggatttgctgtgggggcggtgtacaactgtgtgctggccacaggaaatcaatggttttcaggaaaggcagggctcatcacaggactgtttctcatgtgctttggctcgggaagcctgctgttcggtcccttatccacttatcttatgggaagcataggatggagaagaacctttgttgtgttagggattctcttcctggttgttttccttttgggcagtgtatgtgtgtgcagccctccaagaaagcatgcacaaaaacacggtaacccaaaggtggataatacaaaaggggaatttactcctgtggccatgatgaagacaggcagcttctggatttattttctgtggagcattctcctgtcagcagtgggactggctttggtgggacaggtgtttaccatagcagacagcttcggattcactgatatgtgctgttctttgatggtgagtatggtatctgtgtgtaatgggtttggaaggctggtattcggttctctttatgataataagggaacaaagcttaccatggggtccatctgtacagccagcatcgcgggctgtgtgctgctgagcctggcagtgtggacgaaagcgggtgtggtgctggtattggcctttctccttatgggattagggtatggtggtgtaacgcccaccaattccaactatatccgggatttcttcggcaaggagaattattcggtgaatttcagcattatcaattttaatctgctgatctccgtttatctgggacagttcctggggagcagtctctatatgaaattcggtaattatcaggccagtgcagcagccttcctggtgtgctgtattctggggctgggacaggtattcttcataaaacgccccagattcgtgcaggtgaaataaaaaagcagcgctccatgggatgtgtaccctaagcaggaggaagccccgtggagcaaaaagaatcccataaaatggaccaatgtccgcaaaaaaaataaagccgtatagaagaaaacggctttattttttttgcctggaaaggctctttgaaccttcccaggcaggcgtttctttttatatttccggatgaagcagggtgaatcagagattttcgaaggaggttctgtttatcacttcatcctggatggcagtacttaatcttgtaaaataggcgctgtatcccgctacccgaaccaccaggtccggatgtgcctcgggatgaaccttggcgtccagcatatcctcacgctttaccacattgaactggatgtgctttccgccatgagtcaggtaggttttgatcaccattcccagcttcttcagatcctcctctgacttcatggcgctgggatggaatttcatattcagcagagtgccctggtagggatcctggtctaccttcatggcactttccagcacggccagcggtccgtgggtatccttgccatggtcaggagacagagaggcatccgccagaatttccccgccctttcggccatcgggagtggcgccggtgcaggcgcctccaggctgatgagctgagatggagatggcgttgggagttaccttgccgccgtaggccatgtccatgctgtggcaggtatctgcgaagaatttgtatacctcggccaccagaaggtctgccgtgtcatcattgtttccatatttgggagcggccaggaaatcctcgtgcattttttcatagccttcccagtctgcgtccagggcttttaataattcttccatggtatattttttctggtcatagaccagtgtcttgatggcagccagggaatcaccggtgttcacaccgcccaccgcccccagcagacttccgttctcaaagtcaaagtgccggtccagcatatccttgccgcaggaaacaccgtccttcatgagagcagaccggaaggggtccgggaaaagagagcgctgggcgattagttccacattgttgcgctccgctgccatatgcataagatggtcaaactgtttatagaaagcttccttgaattcctcaaaggtttccatcttggtcacgtcccctgtggggattcccaccttttccttggtaaagcggcagtagccgttgtgcatgaaaatatcaaaggcctgggcgatgataaagaaggtcaccacctgacttctggtcttggcaggaatatttccgtccacacagccggtagcacagtaatctctggcgtcctgaatatccacacccccatcggtgaagaagcggatatagcttttgtcacttaagaaggcgggcatgccaagaccggtcttaaccacctccagagccttcacaagaagcttctccggcgtgttttcgtggacacgtaccgtgatggtgaagtggggaagctgtgtgtccctggcagattccaaaagaagataggacagctcgttggtcacgtccctgccctgggcatccacgcctccgatggtccagttgtaccattttgccatgccggagtttttcgcccggttggccttaccggaaacacggttgatcttcatggttttacaccgcatgatctccagaagctctaacacgtcttcatctgtgagaagtccgttgtcaatgtcatgacggtaatagggatacatgtactggtcaaaacgtcctgcggtggtggtgggagaggggcaggccagcaggaaggtgaaccagaaggactgcatggcttccgggaaggtttcagcaggttcatagggaaccttccggcagatgcgggccatctccagaagctcggcccttcgttttggggagacctcctttcccgccatgttctctgccaggtctgcatatcttctggcaaaacgcacccaggcttcaaacacccggatcacggcttcccagtaattttgcttatcaatgctgtcataggaggtatagcgaaggtccttcaggcattgccgggcctcttctatgacagattttgccccttccttaagaatccgctcatagtcaatgcacaccaggaaaaagccaggtcccaggccataaccggacatggcgaagccgcccccagagcccccttttctgtccttccagggaggaaggatggttccggatttcataaaaggccaaaggcggtcattcatccccagggatttggacagggcgtccaccaggttgctgttcagggcattgtctgcaaagcgcttgttcagctcatataattcctcttcatcctcaggagagatggtgtacagctcacttttcagagattctacctcatccttggtccacacaccatattcatactgcatttccatgccaaagggcttgctggccccggagccacacagcaggtcagcctcctcaatgaaaatggtgatgttgtccagaatatgttcgtgaagctttgcccggcgggtgatcataggttctcccacagttgcgtcaagggattcattagccagccggaacagttctatacaaaggggatatttgcttactcttaagctgtctttcattttttttactcgttgattcataggttacctccagtcttgttcagttgctttcattataaggaagataaaaatccagaacaacacaaggaggaaaagttgtgattatctggatgaaatgcacaggaagaagaaaaggggttgtgcatgatgccgtatgaggaggacttgggcagggctgtgtcagaaacagtgacatgtctggcccgaaatggaattacatgcagatactcacggaatttgtttgcttattgtgtattcacgcaatataattatgaaaggaataggaacaatgggggacaaattatgaaaattttattgattgaagatgacattgagatcagcaccatgctgaagaattttttgatgaccgagaatttccaggtggacactgccctggacggggagagtgcctgtgaaaaattctattctgacacctacagcctggttcttctggatctgatgatcccaaagatcagcggcatggaggtgatgaggcggatccgtcagaatagtaccatacccattatcatcatgtctgccaaggatacggattctgacaaaacactggggcttggcatgggagcggatgattatatcaccaaacccttctccgtcactgaggtcctggccaggattaaggccaatatcagaagaagcacccagtatgcgggcacacccgtgaagaaggagtcaatgctcacaaggggccgcctgacaatgaacctggaggattacacggtacaaaagaatggtgtgaaaatcgaccttacggctaaagaatttgaaattttgaaattattgctgcaaaacccgaaaaaggtctacaccaaggagcagatttattccctggtgtggaaggacgcttattttggagatgagaatgcagtcaatgtgcatatcagccggctgcgcaataaaatagaagataatccaagagatccccgctatgtgatcaccgtgtggggaatcggctataagctgggggaggggaaggatgagtgagcatacagttctgttctttttgactattttaattataattcttataagcatcatcttgtatcagcggtttacgtttaataaagggattcagaccaagctaagacagatcacccaagagctggaggaaattctggagacccgcagcgatgaaaaaattatggtattcacagataataaagtccttatggagctggcagagcagatgaatcacctgctcatagactggcagaagacgaaggtggattttcgaagagaggagctgtcctcgaaaaaaatgctttccaatatctcccacgacattaagacaccccttacagtgattttgggatatctggagatcatgcgtctggacaagcctgaagatgaaatgctgaaaaaggtggaggcgaaggtgaaacaggtgatggacctgatcaaccagtttttcaccctggcaaagcttgaggcaggggataccaatctgaagctggagaaaatccatattaacgaggtgtgcagagaaaatattttaagcttttatgatatcctgctgcaaaaaggcttttccgtggagatatccataccagagaaggggattttcattcagggggaccaggaggcccttcaaaggattctttcaaacctcttgtcaaatgctatccgttatggcgggcagggaaagtatctggggctgtttttgcgggaagataagagttttgcctacattgacgtggtagataagggaaagggcattgaaaaagaatttgcccacacggtttttgaacgcctctataccatggaggattccagaaaccgggagatccagggaaacggcctgggactgaccatcgctaagaatctggcggcacagctgggcggggatttgtatttagacagtgttcccaatgtgaaaactacatttacagtaaagcttaagaaaattccatccatgaactaaatctgtgaataaacggaataaacgaaagaaattcgtaagaattggtcaagagttttgaaaatccgtactgctagaatggtattcagaaagggggcaataaaaaatgccatatctgatgcaaacgatagatttaacaaaaaccatagatggaaagaacctggtctccaatatcaaccttcatgtgaaaaaaggggaaatctatggattcctgggtcccaacggagcaggaaaaacaacggtaatgaaaatgatcaccaatctttggaagcccaccagcggtactgtggagctcttcggaaaagccctgaatccggactcctaccaggtgctgaaacggatgggaagtattattgaattccccaccttttacgaacatatgaccgggagagataacctgcagcttcactgtgaatacatgggctattacaacaacggaagcgtggatgaagctttggaaatgctgggtcttacacaggcggcgaaaaaacctgtgaaaagctattcccttggtatgaagcagcgtctgggcattgccagggcagtgctgtgcaggccggagctggttgtgctggatgagcccacaaacgggctggacccagctggaatgaagcagatcagagatttattccgaatgctgtgcacggagtacggaatgacctttatcatctccagtcatttattgtcagagattgagagcattgctgacaccatcggcgtcatcagccatggaaaaatgaaaaaggaaatctccatgaaagaaatttcagagatgaataccgcctatattgagctggtggtggaaaatgtgaaaaaagcagcctatgtgctggcagataagctgaagctcaccaatttcaaaattgtggatgacacgaagatccgtatttacgaaaaaggtgcctccacacaagaaatctccaagaccctcatgcagaacgaggtgggaatttcttctatgaacaagaagacagagacgctggaagattacttcctgaaattaacagcggaggtggaataggaatgttaaaattaattaagcttgaatggaagaaaaataacataggaaaatatatccgcagcgctgttattttgaatgtactgctttgtgtctttctctttgcgctggcatttctggggattgccaatgaccctgacggtacgctggatgcggctcccggagcaaatggcatctcctcagccattgagctgtttaccagtatgatcttccttatttttaccggagtgatgctggcctcctttattgtaagcgcctacaagaacaagaccatgaaccttatgttttcttatcccattaagaggcagaagatcctggcctcccagatgattgctgtgtggctgttcaattttgccgctttggtactgacaaagctgtgtgtttatctgtgtatctttgtgggagccaagtacaagtcttcttctttcctcattgattttgatatgggaaatgtgaatttttatacccagcttctcctgaaatcttttgctatagttagcatgagctttatcgctctgtttgtgggaatggccatgaaatcctcaaaggccaccattatcacctcctttttgctgatctttcttacccaggcaaatgtgggagatttgacaatggcaaataatgcagtgtttccactggtgcttaccctggtttctgttggatttgcattcctgtccatctataatgcagagacgaaggatttaatgtgacagtacaacggtgtgaactgtcaggttggattttatgaaactgccagaagcctgtaaaggaagaaaatcttacctttacaggcttttggcaatttaaaagggagtagtcatggttatcactcatggcatctccttctccttgttaagtgggattgttcatcagtttttaatgcagaatagaattgaaagccaacccatggttccatgggctgaatactgcatacttgattttacttctggacatagtataatttttgtatgtagaaaagttgataagggagtgagcatagaaatggaaatagcaaacggccataaatgtcagataaatgcagcaggaaaacagattacagtctaccctagcgctgtgccggataagcctgttgtatatttgaatacattttccggggaaggtgatgaagtatataggattttgcatcaaggggattgtccggattttacccttgtagccgtaagtgggcttgtgtggaatcatgatatggctccgtgggacataccgccgattttcccaaaggacgcaccctgcaccgggggagcagaccattatttaaaggttttgatacaagagatcatcccaaaggcagaggaaaagataccagggcaggttttatggagagggattgccggttattcccttgccggactgtttgcattttattctgtctttcagacagacttgttttcaagaatagccagtatgtccggttcattttggtttccaggctttgagcagtacacattttcccatcatatgaaagggagtcctacgcatctgtatttttccttaggtgataaagagtgccatacaaaaaatccttatctgaaatctgttcaggaaaatacggaaaaaattgttctttttctaaaggaaaaaggcattcatactatgtttcaattaaacccgggaggtcatcataaagcttccgtccaaagaacggcggcggggatttcctggattttaaatcaataaaacgtaaacaaggatggatgttataaagaaagatacgattctttctctatttcttcgaaagcttagggattgaaaatattggtaataaaaaagattttgcctgaaagttcataaatataacgcccgcaggcaccgatgagcgatttcattgaaaattttcctaattgttatgcaaaaatgtgataagttgtgttacaattagacaaaatacaccttcggatagtttggcagaggctggcttgaggaagtttcgggggagggtatagaatggaagggcaaaaaaggaaaagggtgtggaataagttcctggcttatctaatgattacagcagctttgtgttttgccggcattcttgttgtgtgtgtatggaagggaaatgcataccattttacctatatggaaggaaaaacagtgacactggaaaggggctggagtttagtcggcaagaatgggaaacaggaattcagttttccacaggattattcctgcagttcagaagaacagatcatattggaaagaaagcttgaccaggagaaggaagcaggaaatattcttaagctgcagtttcttcatttaaaaacacaggtatatcttgacggggagttgatttaccaggccaatcagggaaaattgcctttttctcatacaccggccagaacgatacattttgtcattcttcctgaagaatatggaggaaaacagttaaaacttgtcctcactcctgccttggaggggactgaagtttaccgtataagtacacctgttttgggggatacgctgtctctgctcagtgagatgctgcacagggaggcatgggcgctgggcggttccataattttgttgtttgtagggattgtcattattattttcagcctctttgtccggaaattgaattttgcaggccagatattttatttggggatgttttccttgctggcaggcatgttttgtttttgtgagacagaattagcagtggtcttgtcccgcaactcttatcttatccatataggagatgcagttgccctgcagctgatctgcctgcccttcttttctcttctgcctattacatgcccggcctactgtacaaaggtggtaagatttggcgctgtgtatgcggcaggtaattttgtggttcagaacatactgaatttttcaggaaaggattattgctattttgtggttgccacccacgcgggaattgtgctttgcattggtgttataatcgcgattcttattctggcagtgggaagaaaagacaggcatacagtttattatatgctcacatttctgcccataggcctgtgtgcagttattgagctgctgaccttttatctggtggattttcctatgcaggggtttttcttcgagatgggagttttcctgtttatccttttacagataggggaaatcagtattcaggttatccacaactatcaacaggcagcccgaagccagatgtttcagacgctggccttgacagatcaaatgacaaagctggaaaacagagcggcctaccagcagaggattgataccctcagtgccagcctttcagggaaaaaaatctgctgcgcgatcatggatgtaaaccatttaaaggtggtaaatgatacaatggggcataataaaggggatgctttgattttggaagcagcacaggcattggaaaaggtcttttcaggatgtggaagggtctaccggatcgggggagatgaatttgcagttattgtagaagagatcccagagaaggaaatggaagtactaagggctgaatttaaggaagaaataaacaagaggaatcttaaaaatacttttccggtgagtgtggcttttggttatgctttttatgatccagaacaggatgagaatttggagcacacctttattcgggcagatgaccttatgtatgaggataagaaaaaagataagcgttcttatggaaaaacctcctgtgaatgattggtttcttcattcatgggaagattttggttacaagtggaagcagactctttatttgttaaggataacgtgaggggtattcttacgaaataaagagtctttttgccaataagggatttaaggaagtaaccatgaaggatatctgtgaggccactggattaagccggggcggcttatattgccattatgagagtacaagccaaatatttcaggaaatgctggatgatctgttaagccttcaggaggatgaatttgaaaagctcatagagcagaagctgccggcgccggttatattggatattgttttacagcggtatgaaggagaaatgcttttataaatccctgggattttacaaaagagatacccgggtttccggaggtgtgtattaccacatttttagctaatattctagatgaatttatagggaaacataatacaaagataatcgcatgtctgtattctgcgaatggacaaatccccatttatgaaatagaatgtaaggtaaaaagaattggcgtatttctctccagagtgggggcccctgcctgcgtagccggattagaggaggtaattgccttaggtgccagaaaaatcatacagttcggcagctgcggagtattgaatgaggatgttgtaaaagataaaatagtaattccctcctcagcggtaagagatgaaggcacaagctaccattactttccaaatagtgaggaaatttctgctgagcaggaagctatagaatttttggaacattgtttgaaaaagcatgggattccctatgtggtcggaaagacttggaccagcgatggaatctacagagagacagcaagtctgatcgaagaacggaaaaggcagggatgccttgttgtggaaatggaatgttcagcctccctggctgttgccaagtttcggaagattccaattttgcagttcctcttcggagcagacaatttagacggggaggaatgggagccaaaggacttaattgattacggactgggcgaaagcaataaatactgccagattgcgttggagtgtgcggtgaatttttagggcgtgggaattcgggagttgtttggaaatttaccaggtggaggtgttttattgcagacaattaatatgagattggaggcaaggcagttatgtatgaatatactgggaagaatttaaaggagaatgatagattatctctttcgtaccatcagcacggaagaggaggtttacagcaaggggaaaagtattaaatggtgtgataagcgtgggagatggaggagaagaatttgattgagtaaggttaaaatgtatgttagatttacataggtattatgaaatgggggggggaatttatggataatctaacacctgagcagcggcataaaaatatgcggaatataaagggaaaagatacgtctattgaaatgaaactgaggaaagccttatgggcaaaaggatatcgatacaggaagaattataaagagctgccgggaaagccggatattgttttgactaagcagaagattgttattttttgtgacagtgaattttttcatgggaaggactgggagatattaaaaccacgactggaaaagtcaaaaaataaggagtactggcagaagaagattacaagaaatatggaacgtgatgaaaaagtcaataaacagctattactttcaggttggacggttatacgtttttggggaaaagatattttaaaaaatacagatcaatgtatacaagtgatagaggaaactatttttgatagtcaaattgatttagaaaagatttaaatgctgcgaaaatgcagcgataaattaaattattgttgttttttcgcagcattaatgatatactctttcagaggtgttgatatatgtataatttgggagaatacctgaaagatgtccggaatgaaaaaggtctgagtcagtataaggtatatgaaaagaccggaattacagattcaagattatccaaggctgaaaatggagcctggagtaatttgaaactttcagaattaaaaaaactagcagatctttatgaaaagccgattattccaatatgtctgatggcaggacttttcagcaaatctgatattgaagaataccactcaggatttagaaatgttgctttgcttggtgacgatgacaaacagcatattcagtcagagattgactatatcttgaagaagaaagagggaagaaagaaatgatttttcgacttggagaattattctgcggtcccggcggaataggctggggcgcaataaacgcagacattggtgatgctgattttggaattgtgcatcagtgggcgaacgactatgatgagtttacctgtgagacatatagacataatatctgcccagatgaaccagaaacagtatatcatggagatatccgtacttttgatatggagcagctggcgccaatagatgcattagcctttggatttccgtgtaatgactacagtgtagttggagagcagaaaggaattgacggaacatttggaccgttgtattcttatggagtaaaagcattgaaaaagtttcaaccacaatggtttctggctgaaaacgttggcggtcttagaagcgctaataaaggaagaacgcttaccaaaatactagacgaattaaaaggagttggatatacgattacaccacatctttataaattcgaagattatggtgtaccacaggcgagacatagattgattatcataggaattagaaatgatattaatgtgcagtttaaagtcccatcgccggttccatatgcaaatattgataatacatgtagaaatgccattgaaaatccaccgataccagcagatgcctttaacaatgaaccaacaaaacagtctaagcaggtagttgagagattaatgtatatcaaaccaggacagaatgcgtttactgcaacgcttccagaggagcttagacttaatgttaaaggtgcaaaaatcagtcagatttataagcggctagatccaatgaagccatcgtatacagtaacaggaagtggtggaggcggcacacatatttatcattgggaagagccgcgcgcacttaccaatagagagcgtgcaagattgcagacatttccggatgattatgaatttatgggaacgaaggaaagtgtccgcaagcagattggaatggctgtaccatgccagggtgcgaagattatttttgaagcagtgttaaaatgttttgcaggaatcgaatacgaaagtgttgatgcaagtatcacagaataaaagtaacggttacagtgtcatattatgacaatgcaaccgcttatttttatttttctgaaacatcataatatatggctccatcaggaagtttgatgtttggaatccacagaggtctgccgtcccagcctttgtttcctgtgacttgatatatagtaagaactacttttgaggaaaattgtgcgcctagtttccaatcatttggagatagtaatgcaccagttccctgggcaacatctctgttgcgtctgacaatcagtattccctgtcctgttggttgttctgccagaattgtatcaataatagaaatgaatgcattaagcttgaaatcaggacttggaataacgtgagagagaatttcctttattattctaagatttacctgataaaaaggttcatcattgttaaaggcctctaaaatttttgataattcttctatattatcattatcaggatagagtggataataatttgtaccgccggagagcatttctacatgattattatccagcacattttttctggtcggattcaaaccgttcggatagtaaattttaatatctcctaaaccacgttctacttgtgcaataatggaattgtttgtggcattaatatctgcgaatagtttataaagattttcgtcaatgaaaactttcatcatgccggggtcacggtcatacccgaacatacggctgtgttgccacatagtatcggcctggggttttttactggtacgtgtataataaatggtctgtagtcctggaaatgttacaccacgtccaagagtgttgccgccgattataaagttacatccggtttcatattcggaattgtctatgtcatttttgccattcataatcaaagttttaatctgattggagaggagcagttcttttactttatctagaagccttctgtatgtagttttttctgttttcgtgggagagagtgtgttgtattctgctcttaatatagtttcaaattcagtatctatgttatcaatacaccatgcaagctcatgtgttacctcatctgcgaatttctgatgaactgcctgacgcacacttggatggaacaaacagttggatactttcccgccagatgccaatatttgagctgaacttgccagatgccggatgataacattacgagttggctttttcagagtttctagataagtgatgcatttaggttttgttttcggaaagaaaaaatcacctcctagataactatcccctggttgaaagtagtaagtgaaaagaggatgccatccagatgtcagcgtctgaagcaaaagagcttgtggagtgcctgttacctgcaggtacaaactgctggaagcgccatttttaatagaatccagatatttatttatggaggactggcgatccttgttaactagtgtatttaaagacgcggcatcggcttcgtcgtctatgataaatagcgggttgccacgcataaaacccgtagagttaaaaatattagcccagagtttaagtatgcgtgtgttttttttcagtacaataattgttggaagaagaaggttgttatctgtgaagatacgtgcgtcattttccccacagatacagaaaccgtctaaatcagcttttactctgtctaaagtctgttgatgcaaaactacgttatcggttgtgagcagtacaaagacaggaaagccaaggtcagtggctttacatataattccaaacatctgaccagtttttccggactgaacatttccgaagagaagtccgatttcatgactggtaaaagaaaattttttaatatataagctgcctacctcttctgctgtttttgagatggattctgccagtttaacattgccgcggtcagtgattttttttaagtatgttttcagatagtacataattaatcattcctttcctcagttattggtttgaatgagagcatccatacatctaatgaattgccgtcttcatctaatgcggtctgtccggtctttttgaaataaagattttcacatccgtattctttcagcatttcttgggtaatcatccctgttctgtctttatcaagctgagtattattaacaggtgagacaagcccggcggcggcaaggcggcctttgagccagcgccccataatgagttcatcaccaacagcactgaactgtttgtttccgtcacttgtcgtatgagctttaaaccagtagccatcatcagttatgatataaaaaggtacatttttttctggatatccttctgtacgcgtaatttccttgggaactgtcagctgtgtttcataccagtctctggatttgcgtttgttccgtggtgcagcatagcagacattaacatttgattttgtgaaatgctttccgtcatccatatgacgttcgctgtaagcaggaaccttaagcggaagcaggaatgatgcgtaagcagcacatcgtttataaaaattaacatttgactgaggtacagtagtaactagttctattccagtgagcgccgtgttgatttcgtggattagcggcatattggtgatttctgcgatattggcagatatatttggtgatttaagcttatctatgaatttgataatctccataacctctgcaggattattggtaatggaagaaatttcatactgtcttctgttgtttgcttccagtttaatggaaccgagattagcggaaccgaggatagcggagtatggaagaccatttctgtaaaaaccatatagttttccatgatatttaaatgattttacaatgcgtatttcaccaatgccaacattctgccattttttattaattttaagagctgtgtggtaggacccttctggcattccttcaatgaaatacataccgatggtgaggccgatatgtttaacattatttttttccacaagctgttcaagctcttctaaagaagcttttgatacatatccgacagcaatttctacacgatctgaaactttaaattgttcattaaagcagtcaataatagttttttgattatcctctgttcctagtggaaggatatttgaatataagagcttcatggcatcctcctattttattcttatttatgtgtaaaaagattataacagataaataatgaattcaccacagaatcaaagaagatttagtctgatataaatgtgcggaggtactgttttctttttatcttgaaaaagtaacggaaatgatgtactataaattatacgaaaaagataactgatacgtttagtggcaggtgatgatcatggttagaaataatatagaagtagatgtgaaggtaaagtgcatagagcagggaaagacacaggtgaaagtggcagaagagcttgagatcactaagagttatattaaccgcgtgatcaaaaagccagacggtgttgtcaataagacttttgtacgtataatggaggctctgggatatgatatcgagctacattacgtaaaaagagaagaatgatttgtgttgacgttgttgtcacaaatttgaagggtagtagatttatgggcaatgaagtaacaaaggcagtgtattcgccatgccaatgaaaatccctttggtgaatatttaaatttcttggagaactaaagaaattaataggagagatatgccattatactttgggaagaccagagtttaatcattgagatttaagcttttaaaagcaaataaagcatataaaggatatcctggaatatagaaccatggaacattatctaagaaggtatgaagaaaaagaaatatgaataatgaggagatagagcaatggtcagacctattatgaaagatgttttctttctggcccagaagtccctgccggcaacagctgcagataaacagactgccattgatttgctggatacattaaaggctcatgaatcagagtgtgtgggaatggcggcaaatatgatcggtgtgaggaagaatattattgtggtgaacatgggctttataaatgttgttatgttcaatcctgtaattaggaagaaatcgggagtatttgaaacagaagaaggctgcctttccttggatggagtacgaaagtgcacacgatacaaagaaatagaagtggaatatgaggacattaattttaagaagcaaagacagaaatttaccggatggacagcacagattatctgccatgagtgcgatcacctggaggggaagattatttgagagagcagtcatggacttctttggaaaatgtccgagtgtggtttgtgccagtctaatataatagaagggaaggtgaaaattgatacgaaggaaaaaatgcaaagaagttaaaagtagttcgtatttaacggataacgaatatgcacagaaagcacttaaaaaacggaagcggattttaagaataaaaatcctatgttttttgttattccttgtggttgtttttatactgatagcaatgggatactctgtattacaacaacagaataggactacggtatataatgaaattacagataatgaggcaaatgccgtggacacagacattttggatgaacctctggaaaccgttgcaccacaggaaacggtgagtttagaggctccggatgtggagcgtgtttctgaaagaaacattttggatgatgagaaaattgccgcaattatgaatagcagtacatggaaaagaatttttgctgatgagaacgcatacccagaggatttattaaagggtctgagacgaaatccggaaatgctggactatgtagatggctatttgactgcagataaaaaagcagcaggtaccataactcaggaagagagagaagaaaaatgtccgctgtttgttcaatgggattctcgatggggatatgctccctatggagatggtagtatagggacttctggatgcggccccacatgcctttccatggtgatctatagtcttacaagagatgaaagtctcaccccggacgccctggcaaggaaagcaatggaggaaggatattatgtggatggttcgggaaccgcatggtcatttatggaggaaattccgccacagtatggggttcatgcagttcagatggatacatggactcagagctttgtagagacggagttaaataatggaaaattacttatttgtgctatgggaccaggggattttaccgaccagggtcattttattgttattcgaggatatgacaacgggaagctagttgtgaacgatccttttagctataccaatagtagcaaagaatgggattatgataccattacagatcagtgtaatcagatttggatctatgaaagcaatccataaaaagaggttcctgtcaataattgtgtagattgacaggaacctctatttttaatctgtgctatttcttttttacaggaaagcagacttctgtgaccaattcctctgggtcagatacctgcccagggtttacatgataaatgcagaatgattttccatcaaaatcatatccattctcaactacccagttggcaaccgccgcatttacacttggcagttgatcgtagctgcctttataggttgcagatgcgacctgaatgggaggcacagtcttaaatttcacgtgttctgtatcctgatatttcccaactacgctggactgtatttctacgtctggatcatgctctttatgacactcatcgtgaaaaatagctatgccataaccagggactgcctgttgtatattctgtggttcggtttcccggcacataatttcccataatattgcctcctggtcatatgctggtattacctgccgcacgcttgccacatagcgttctggtactgtttttaatgttacattgtaattcataagattaccatcctttctcagacatttcagtgtattgtcaagaagttgcagcttctgctgtatctctaaggctgctgcctccagctccttatgctttatgagcagaaactgttccatttcctttgcatcctcatatttgaccagtatttccttaatggcagaaagaccaaatcccaggctctttaatgtctgtattcttccggccagaggaagctggcattccttataataacggtatcctgtaaaatcatccacatattctggatggaggattcctatttcatcataatgccgaagcatccggatactgattcttgacagttttgaaaagtctccaattcttaacattctttttacctcacatatatgtgtttttctgagctcaatgttagtttaaagtataccatagtgtgagagtcaaccacttttaaaaaaaacagcaatccatctgtctataaaacaggaacacaattcgcaaaaatgtatgatcaatggaaaacgccatatatctgccgccagggagattttggtgttttaaccattcttatttaatgatatattgatggaaagagaagtttaaagttatttaaagcgacaaatgtaggtgttcgtgttgttctttttacgcgctctatcttatcagtacccatattctgcccggccatagcggtaacagcctgcccgactgcccaacagggcatccctgcaaaggtgttgacttttcagccgatcccggatgctgcggcaacggacaccccaaaattgtttagcataccggtgatcagaagataagagatattgacaacaatcatttgaatcgctgtaggtaggctgacttttaagataacggccagtttgtcaggcttaacggcaaattttcttatctaatatattctattatccgtcttattaagcatgagaaataaaatcagcaagaaatgtgaaaactctcatgggtttcttgggtaatatgaatatagggaggcctgtttttgccgatagcatgcagccgctggtctatcaggatatccagaagtcattacggtccattcagcggttgaaaaccccaatctgaatgtggaggaagatgttatgcttcctttgcttctagatggtaagaaaatgggaagttatcaaaagcagctcgaccatatattggagatggtcggcctgactgagtgccgcaggcatacacccagggaattatccggtggacagcagaacaggaaatgagattatggaattatttcaggaaattaaccaaaccagcggccaaaccatcatcatggtggcgcattccccggaagcggctaagagcagcagccgggtgattactgtgcaggatgggttgattctctgaaatagaggcaggaagatgcctgcctctttcaagtgaaaaagtacacgcgtgctttctaatgttttaccggaataaaaattttaaccttattatccggattatcgaaagaaataatttcatgttcataaatttcaaaatcttcccggtcatccagttctactttcgttgactgcagccatgtcccaaagatatactgatacgttttgtataaatttgccagggtgccccggtgggtaaaaacggcatatcttccagcgcttagtgtttttctggaaaattcctgcggcagatggtcaaaatcacgcaccggaccgccgaccatgaccgaaaacagtacgttgccgtcttttgtataagctgtctgctttgtttcgcatatgctgtattctacaggtgcggcaaatacttctttacggagactgtggaactgcttccacagttcggggatccggttatcagaaagagaagtagttccccgaagtccggcaatctttgtttcttctaatagaacgatttcgggtgaccgtgaaatgttattcgcgatatgggactggccagtggctgggcccggagcgcaagccgtcctatcaggcccggcggcgtggtgtcgttccttgttcccggccaggatcgtgcgacccggcttcgtgcgtctaccctgggggatggtttcagccaggaggacattgtggcggtgatcggcggggaacggcccatcccggagctcccggctgaggtaagggcccgtcaggatgccttaccccccgcgctccaatttctccaggagcacggcctgaccgattatgcggcgctggaggcgcagaccacagcggcggtggagcacttccacgccctgaccgaaaagctccagaccacagaggccgccctctccaaaacgtccgggctcatgggggccgtggtggactacgccaaaacccggcccgtattcgatggttacaaggccgcccggtatagcaaaaaatatcttgcggagcacggagacgagctcgccacctatcgggcggcgcgggcatccatcaatgcgattttggacggcggtaagctcccgtcgatggcaaagctgaaagaagatcggcggcggctggcggcggagaaaaaggcactctatgtcaagtaccacgcggcccagcgggatatgcgggtggccctggctgtcaagacgaacatcgaccatctgctggggatcacggcccccggcagggataaggaacaggcgcgatagcgccagtgacgcagccaatcacttctggacattttgtccagaagtgccgggtttggggcgggccccaacaagcatttttgcggccccggcgggggcgcaaaaatcgcaagtgttatacacttgccctgcttgccggttagcgaaacctgctagttgaccgtttttgtgaggcgtgaaaaaagagagtacgaaagccttcgatattctctgctctgacttcctgtgatcctctattattttaaaggattttaacttttattactatctttacactgacaagtttctgtgctataatcttatcaacgtaaagattggaggataattatggaaacaaaaccataccatcatggggatctgcgccgcctgctcatagaaacagggattgagttcatcaaccaggaaggagaggaaaaactatctttacggaagatagcagtgaagtgcggcgtaagcaacgccgcgccttacgctcattttcataataaagatgaatttattgccgccattcagcagtacatcaccgatttatttactacttcacttgaggaaacaatgcaaaaatatgcgaatgactctgcactacttcccatgctcggaaaagcatacgtgacgtttttttatcgaaacccgttttattatgattttttgttttcccgaaaaaacattaagattaagttgtccttggggaactctgatgaacaagaaagcacaccattagaaatcttaaaaaaagccgcaattaaaacattcagtaaagttaatatgccagagaaaataatacaagataaggtgatcgcaatgtgggccttggtacaaggcttatccatgattgcgaccatgccgaatgtcgagtacgacgatgattgggagacaagaattgaaggtattattaaatccatttccatcccatatcaaactataagggagggaaatgaatgaaagtaattatacacgatttagagaatgaacaatttgagttgatgtttccccatattggtaaagatactcttgttatttccgatacggggcgcatccaaaactgtatcggctgctttggctgctggattaaaacgccaggagaatgcgtgctaaaagacgggtacgagcaaatgggagccattctctcccaaacagagaaagttgttatcatcagtcggtgctgttacggtggatatagcccttttgtaaaaaatgtgtttgaccgcagtattccttatcttctgccgttttttaagactaagaaaaatgaaacacaccacaagccacgctaccagaataatttccgcctttccatatatttttatggggaacagattaccgcgcgagaaatggatacggcacgaagccttgtaaaagcgaacagcgtcaattttttcgtgccgcaatatgaggtgtcatttttgaaaacaccggacgagttaagaaaggcggtgaaagtgtaatgaaaattatcattattaacggcagtcccaaattgggggatagcacatccgggctaatgattaagtatcttacttcggcaatcaacggtcatgaaatcacaagttataatgtcaacagagaacccctggccgaagcacaatttgacgaaataaaaagcagtaacgcgctggtttttgcatttcccctgtatatcgacagtattccggcccatctgctgcgagtgcttataagtatagaaaaacgggagtttctcaatccccaaacgctggtttactgtattgtaaacaacggtttttttgaagggcgtcaaaatcatgttgtcgtagaacaaatgaaactctggtgcgaagccgctcacttgacttggggacaggctattggtgtcggcgcgggtgaaatgctcccgcttgtaaaggatattccattaggatatgggccaaacaaaaatattggagatgcgattaaaaccttgtccaaaagtattacggccgctaaaagtggaacagacctctttatatcaccgaactggccgaggtttctttggagattgcaaggctctgtgctggtctggtatccacgcgcaaaggcgaatggattaaacaggcgcaaaatgcggcgacgagtgaaagattagataattacattaagagcttctggacatctccctgtcggaaacggacgggctccaactgctccggtttatgcggcaaatgaggaatatgccgatcctggtgctgtcctttcagggcggcattgagcaccgggcgcgggcctatgaaatgggcgcggatgatttcatacaaaagctcttggagctccaggagtgcctgctccgggcccaggcactcctccggcgctataacgccacagccccgcccctgcccggccagcggtgctacactatcgttacgtttgaaaacctgttgatcgatccccttacccgtcgcgtggtctacaatgggcgggagttggacttaccccgccgggagtttgatctgctgtatgtgctgtcctctcaggccgggcgggtgctaacgcatgagcaactgcgctactatgtatggggcgatgattttgtaggtgacgaaaccaacgccatccccatcagtgtgagccgcctgcggcaaaaactggacggcggagactgcattgaaaacgtccgaggcgtgggttatcgctttgtagaccccaaacgcaaaaaagaataatgtgtatcatttagggcccggctgtcaacatagccgggcttttctcatatcctgccgcaagttgcggtatttgttaatctgctgaaaatttgttgaaatcttaccgaaaatctagtgttttatactctccccaaaacggggggaggcgctggaattggccggaatatgggaaacaaaaggaaaaaataaatatgagttaaacccggccagcgccgctttcccgcaagggagagcggcgtttttctgtccgacttatttcgggtgcgttctgcggcaatcgcggaatagtccctacttcgagacaaaatgtccagaggtacggggcggcaccccaggatgccgctccccgcccgttctccattttcgatccgcgcaaaccctaaaaatcgaaaatggaggacgtaaaaatgacaaccatcaatctgagagattttttctattggtacttaccaaatatcatatgttgacagtatgatctacaatatttacaatgaaagtattcaaaatcggatgaaacttttggaaatagaatacaaaatttacaaaggagagatatggacaggaaaaaacttgtcgatcagagcattgactatattatgcagcatttagatgaagatttatcgctggagtctgtagcttcccggtttttcatatcgaagtaccatttttcccggatatttaaggcagagaccggcgaatctgtctattcgtttatcaaacgatgtaaggtggatcaaagtgcgattgatatgaaattgaacccggaaagaacaattacagatattggcttagattacggatacagttcttccaactatagttccgtcttcaggaagcatcatgatacttccccagctatattcaggcagtccataccaacccatagtatgccggttccctttaccccggagaggactgcacatttcaaaaccgctagggaatatgccgcacaaatcgagattcaaaagcttcctgatttatttgtgctctttgagcggtttatgggaaactatgtggatattgaaaaacattggtaccagtttttggataagtataaagcaaatttgagtgagaggaccattttagtggaacgctttttcaatgaccctgcaatcacgaattcaacacaatgtatctgcgatatctgtatgacagtggaagaggatttcggacgttataatgtgatgcggatcaaaggcggcaaatgggtagtgtatcatttcgacggagaaatcaaagatatttttgaggaattacaggggattttcagcgtctggttccctaaaagcggttaccgcatggccaggcgttatggactgaacatttatcgtcacattgaccgggagaatcataaggttgttatggatttatgtatcccgatattataagagcaagaattcagaagttataaggacggctttctttctataatcaagaagtgttttagaaatactttatatagaaaggaagccgtttttatgcagcctcataaagaaaatgaaaatcctgtcgtttgggacatagagtattgtacaccgcctgctgtattacggtattgtaaaaaatgcggaaagaagacggaatatttaagctccggggagtttcgcattaatgcacagcaaaaggccctggatatctggctgatctataaatgttcccgctgcaatacgacctggaacagcaccatctattctcgcgtttctccgcagaggataggaacagacctgcttgaacggtttcacagcaatgatgagtccttggccatgcagtatgcgatggatgtttctcttttacatagaaatggtgtggaattcaaaatgccggcatatgtgattactggggaagatgtctctttggataagccagtgagtattaaaatccaaagtaaataccttttaccattaaaattatcttccattctgcgcacgaaacttggtcttacgcagcgtgcatttgataccctcgtcttaaacaagcgtatcatgtgcaatacaggacaggatttaagaaaatgcagattatcatcccgggaaaccatccttacgattactacttgacttgacagacaaaagtccagaggtgtgttttgaggaatcacaaaaatgaaaagatatggaggttgcgctatgtttgatataagaaacatacaggagaatgtaatttatgaagcagtcaaagccaaaagcaatgacaggacagccaatgaagtagtgtatggtaaggaaaagcaggagagggcagagaagaatcctgaatgggtgaaatcttcgatgcgccgcctggagagcagctttgatgacaagacagtgagagaaatacggatgaactgccaatgtggcttcggaatggacgaaaagctagcgcttgtagaggaactgttgtattccgcctcaaatttggaggaatttgtaagttcggagaaagcaaaggctgccgggcttttctgcaaagacggggagctttttctgcagtttaagttctgcccctgccctatgcttgcccaagtggatagattagagacgaatacctggtgccagtgtaccaccggctacagtaaagtcctttttgagaaggcgtttgcctgcgatgcggatgtggaattactgaaaagcataaagatgggggatgagagatgcctgatgaggattacgctccataaccctgtctggcagtcagcaacctggtagaaacagtttggcagccgtcaaatgtacatgcaggcatgtctgcctggcctgttgcctgcggaaataaaacagcacgaaatgtcatgcgaggagaaatgacatgaatattttagttactggcgcaaatgagggaataggttattatatggttgcggagctgttagagcaaggtaacaatttaaccatactcgacattgaaatcttggaattgctaaaattgaaagaaaaatatcctggtaaggttttgccagtcaagtgcgatgtcagggatacaaaaggtatgcaggaagcagttaagaaacgcctatctacatacagcagcattgacattgccgttcataatgcctgccgttgtacatttcaatccatgcaggaaaacggaaaagtaattctgcctctccactccctgttcctcaagaattttttggcagaccccaaagtagttggaagtggtcttgcaagaagaatagacaaaaatagctattatatatgttattccgtcagccaacatttgcaaacaagattatgccacctttttccaaataagatgggtaaaatgatgagcagattatagaaaaagaatcaacaagcatgataatgacatgatgacaacagtttgacggcaaagagaaaagtcatatccttaaaagaaaaatgtttaccgggctattattttaaaaagtgttttctatttggttcaaaatggttataatgtaaacagaaaggtggtgctacaaatgctggatagtttattgatcatattaaagcattatcatgatgatgttaaaaaaatatttggctctgcgttgtataaggtgattttgtacggttcttatgcccgaggagattttaaacaggactcggacattgatattatgattctggctgatgtacatccagaggaagtcagtaagtatgctgataaagtttatgatattacttatgattatgagatgcagtacgaaatggagattaatcctgttgtacaaagtattcagacatatgaaaagtggaagaaaacatatccgtattttatgagcatagaaaaggagggcattgctgtatgaatcaggatatatatgggaaaaacacggttgaaaatccgggaagatacggaacttaaaaactttctgttgtactgtccgaaatgcagacaagaaagtctaatcaatgtacaacaactaaatatgtcagttatcaaagagccagacgcacagccgataacctatgagattttgtcttatggttaccggctctttatctttgatatgaattaccaacggcggccatgagataaataaggccgctgtttctatgcggccagcctatgacaatcatcaatctacgcaagtattactaccctcttgcgaaagcagacgtgtttgtagaaaaaccgcaaaaagtatcatgtacaatgctgctatggcccgtaaaatagaaacaggttattactctaaatgaagggaggatattgctgtataatgaaaagcattttagaaatggaattaacagacaaacagtttgcggctctgtctaacaataccagacggaccattcttcgggtcatatatgatatgcctatgtgtccgagaacaatttcagagcagaccggaagcagtatcgcatctgtgaagcggcatttacgcatactgctggaatgtaacctgatccctgatccttttgagccggcagggaaatatcaggacgtacaagtaaaactgtgcgcttcttatattgtgagagaggaaaaattgtaactattcagcaatgcaagttcaattccgcggcagagccgctttacccgacgttacctgtctgcggtcagatagttatgtttggacttcctgcctgcatgattcaggtggcggcaacgcttctgcagattgagctgaataaagcagccgtgcgctgtggaacctcaagtgtgggcagcgaagcggcactcagcaattttggcattgtgtttcggatcagctccgtggtggtatctatctgcgtaggaatatcgcttgggatgcagccgatcatcggattcaacaaaggcgctggtttggaacgccgggtaaaagagacctataaaaaagcagtcggcgccgccactgttgtctctgtcattgggtggctgggcagtgagctgttcccaggaggaatcctccggatttttggaatggatgagcctgcctatatggaatttggcatacggtgcatgcgtatttttctgtttggcatggtcgttgcgggattgattgtctatgacagtaaaagtaagaaaaaggagtgtaaacatatggcagatattatggtacatggacttacccaaaacaatttgaagcatgtcactttccagattccgaaggaaaaaatcacggtgtttaccggggtgtccggttccggtaaatccagcattgtctttgacaccatctccgccgaatcccagcggcagatgaacgccacctatccggcatttgtacgttccaggctgccgaaatacccaaaaccggcggtggagcgtatagataacttaacaccatccgttgtggtggatcagtctcccttaggcggcaatgcccgttccacggtgggcaccatcagcgggctgtatgccagcatgcggctgctgttttccagaatcggacagccctcttggaatcatgaccgtcgtgaccggagtggccggttcgggaaagagcacccccatttcccaggtatttgccagacagtatgaaagtgaggttgtgatggtggaccaaggacccattacagccaccagccgttcaacgccggcttcctacctggggttctttgacgacatcaggaagctcatggcacgggagagtggcaggccggaaagcttgttcagctttaactccgccggagcctgcacggcctgtgggggaaaaggcttcattgtgaccgagcttgctttcatggatccgattgtcacggaatgcgaggcctgcggcgacgtgcggtataacgaggaggcgcttgcctgctcattgacattggaccagatggagggaagaacgggggagaggtggtatttacagggacgccagcggacatgttaaaacatgcaaaaacactgacggccgactgcctgcgtgcatcctgtcctgataagaaggagtaaaaataattatatcattgcgctcatgataagataaatctgatagtatgataggactaatcagattaaaacacatttccgtagacaagcgggaaattttacagcgtatgttcatcgatgtcaatacgaaatgacaatcgggtttgcataaagtatgtttgggagtaacagttcagtttgtctgaactattacatttggaaacattcccctgctgaacagatggaatgaaaatgatagaatagggtatccaacctatccaaacagaacgctaaaaaagaggaaatgccctgataaataagttataatggacaaaggaagaaaggggcagatatatggagtggaatgaaagattgcagatgattgtggactatatagaaaaccatctgcagagaaaacaggagccagtcaatcctaaggaagtctcagaaattgccgggtgttcctttgtttttttcaaaaggtattctcatacatgagtggtgtcagtttttcagaatacatccgttccagaaaactcactttggccggctatgattcacccacatcctttacgaaggcattccagcagtttcatggcgtgacgccgggcgggatacttggcctgtataactgtgagaagtcctgtccaaaggaaatagaatattccatcatggtaatctcagacaaagagttcctaagggataccgtgaaatccagatacccgatgccttatgggtggtatttgactgcagaggggcagtgccccaggcaatctaaaatgactggaagtacctgcaggaggaatggattacgaaatatccgtttgggcatgcacaatgcccggaactggaatggtacagccacggtaattctaatgatggagattacctgagccagatatggataccagtcatagacgaagcatagtacatagaaaataaaaatcaggaggacaaatacatggagttaccttttcgtatcgtaaataaagacagcttccgggttgtcggacaccggatcaagacaacaaaccagaaaggggaagggagaaagcagattccgctgcattgggctaatatccgggaaaatcatctggaatcctctttgttagaattagcagatccgggaaatgacggactgttcggcatcaatatttataatacagaccctgcagattccaggaaatttgaatatatcgtagctgtcccaagtgactgtgaggcgtcggatggactttccgaatatacggttccggctatgacctgggcggtgttcccatgcacccaggataccatcgggaaaaccgaaagcctggcaatcaccaaatggctgccaaaatcaaaatacagaccgttaaataaaggctatattaccggcaggatgaaatccggggcgccggacatggaatattacgggaaagacggtcaggctgaggtctgggttgcagtaagggaaaaataaaaagactttgaaaagttgacggaggtatgcagtattatggataagaaaatagtgtttgatgatttcatcgcttcggtccctgttgagaaccaaaattttgtaaaggaattacataacagattaatggaacttggctgcaagatagagattaagtcagcgaaaagcggatatatggtttcttacctttataataagaagacagtagcaaattatgtgttccgcagaaaggggatgcttgtccggatttatggggttcatgtaggtgagtatgaaaaggttctggaaaccctgccggatgagatgatccgggaaattcagaaggcgccaatttgtaagcgtctggcagacccggctgcctgcaaccccaaatgctctatggggtatgacttttggttaaagggagagcactatcaaaagtgccgtaacagcgcatttctatttttggtatgcccccaaaaccatccatttattcagtcattgatattaaatgaagtagaagagtgggagaaatccaacttgaattaaagaagcccggaagctgcagttaaaaactgtgcttcctggtttcttttttgcctgcattgtatgcacaaaaggagaccgtgctgttttgggggctaaaaaagatatggatgcttagtaagaccacgagaggtgcccatggtggacagaatggaaatgatgattgaaagaataccgacgcattctcgttactttagtgatgagttagtcggattatgtgcctgttggcacgtaaaaagggggttgtgtgctttgttataaaaaatcaaaaatgtttttgcggtacttctttagctttaaaacggattagttaacataaaaacagaacatatattcgatttttcgttgacatataagtatacatttggtattatttatgtatggattatatgatatatcaaatgtttcaaagcttacctatggccgcggatatgtgtattccctgcaatatcacctcgtatggtgcacaaagtaccgtaaatcggttttaaaagatgagattgacacagaatgtaagatgctgctgcaggacggctcttccttacccatccggagctgaagcacagcctgtggggcggacacctgtggaacccttcctattgtgcagttacagtgagcggccggagttacgaataggtaagaagctatattgagagtcagaaagcagaggatgatgaggagtgaacaaagctgtaaaataccgtatttatccaacaccggaacaagaacagaagatgctggagacttttgggtgctgccgttttgtgtacaatcattatcttgcactgcagaaagagcggtatgcacaggggcagaagcatctgtcccgtatagactgtaataatgactgcaaccgggtgttaaaaaaggaatatccctggctgagagaagtggataagtttgccctgactaattctatttacgcactggaaaatggattccggagattttttcagaagaagggcagatatccgggatttaaaagcaggcataggagtaagaagtcttatacaacgaattttaccaacagcaatatcaaggtaatggaagatgccatccagcttccgaagctgggaaagatcagggcggttatacaccgggagataccgtccgtctggaagatcaagcaggcgacggtttcacaggagagggaggggagctgttatgtgtcccttttgtgtgaatatgagaggacagcagaaccggtaaatgtctgttatgagaaggtcctgggactggattataaatcagatggattatatatggattcagaagggcgttgtgcggggatgccgcatttttaccaaatgaatgagaagaaactggcgaaagcccagagaaagctgaaaaagaaagcagtaagatcaaaaaactatgccagacagcagaaaaagatcgcgaaaatccaccggaagtgtgaggatcagagaaaagactacctgcataaaagatcaactgagacagccaatcagtatgatctggtatgtgtgaaaagcctgaacatgagaaaactggcaaaccggggattcgggaacggaaaggcaacgctggataatggatacggcatgtttctgacgatgctggagtacaagcttgcagataggggaaaatattttgagaaagtggaaccgtggtttccatcgacgaagacctgaaatctttctaaagacaaaagattggtttacaagcgaaagatttttcctataacgtgcctggcaaaaggtgtgagaaatgccagggtgccgagaaactaactatttttatgaattttcttcccgatgtggaagttgtttgcccactctgccatggaaaacggtatcaaaattgagttttatccgtaacctacaaaagccacagcattacggatgtacttgcgttaagtatagatgaagcggcactcctgttcaaagaagagcaggaaatttggagaaagttaagggtgcttcaagatgttggccttggatacctgggtctgggacaatcagcgacaacactttccggcggagaagcgcaaagacttaaactggcaagagaattagcaaaaccgacaggaaatcatattctatatctctttgatgaaccgacctgtgggcttcatccaaagggcgcaaatcatttaatcagcgttttgtaaaaatgggaaacagcgtaattgtgattgagtataatccggaagttatcttgtcctcggattgggtgattgaccttggaccggaaggaggaaattacggcggaaatataattgtacaggggacacctgaaacagtgattcattgtgagacatctgcaacagggaaaatactgaaaaaatttgtcaggagcgcggcaaacacgccctctttataacttcacaaatactttctggagaaaaaactctccactataacaccagacttaaactgtgaggtataataaagcgaaaagggggtgtcaaagcatgaaaacatatcgaactgctgaggtggcaaagttgatcggaatccatcccaacacggtgcggctgtatgaggaatggggacttattcccaagacaacgcggcgtgaaaacgggtaccgggtttttacagagttccatatccagcagatccggctcgcccgcatggcttatcaagtcgagatcctgcaaaatggcctgcgaaaacagattacgagaatggtcaggctttcggccgcaggaagatttgacgaggccatcgaggttatggaagcgtacctggggcagctgcgcctggaacgcttccatgcacaggaggcgattgagatcgcacagcaaattctggctggcgaaagtcaggacagtattgccgccatgaagcggaaggaggtatctaagtatttgggcatctctatggacgccctgagaaattgggaaatgaacggcttgctggcggtcaagaggaggcagaacggctatcgcgtctataccgatgacgacatcagaatactcaaaatcatccggtccctgcgctgcgccaactactctctggctgccattttgagaatgctacagcaagtgtcgaagaacccggatgtggatttggagaatgcgctcaatacgcccaggccctccgatgacattatttccgcctgtgaccagctcattatctcactgaatcaggcggaaaagaacgcattactcctactggatatgctgaaaaatatgaaaaaacggttttcataaagcctccatcttcccaccaatgtttccatgcgtggtatcctttgttcaaacaacaaaggaggttgaaacatgcaagaagcagtcaaagtcgaaggactatcaaaatcttatggcgatttactcgcgctggacaatgtgaacctggccgtccggccaaacaccgttttcggtctgctgggcgccaacggcgcaggaaaaagcacagtcatcgaatgtattttggggacaaggcgggcggacaggggttcggtttccgttctgggaagcaatcctcgcagggataggggcagcttattccaaaaagtcggcgttcagttccaggagtgcgattaccagccagagatcagggtttcagaattgtgtgaggagacggcgtgcctttaccagcgccccgccgaatggcgggcactctgcacccagtttggcattggtgacaaattaaaaaatgcggtcaaaagcctatccggtggagagcgacagcgtctgttcatcgtactggccctgattcccaatccacagcttgtcttcctcgacgagctgaccaccgggctggatgccagggcgcgtcgggatgtttggcgcatccttgccgatttgaagcgcagggggctgacgatttttctcacctcacattttatggacgaggtggaggtactctgcgatgagatctgtgttctgaaaaagggccggattgtattttatggaacggtcgcccaggcgaaagagcaatgcggctgtgagaagctggaagatgcctatcttatactgtccggcgaggaggagatacaggaatgaaaacatttggaacacttctaaagaacgaactgaaactcaatatccgtaatatggacatggtgattttcgcagtcattatgccgctggccgctctggtcatctttggatttgtctacgggaccaaacccgccgccgatggggtggactatacctttctagagcagtcttttggtgcgctctgcaccatttccatctgcgccggcggactgatgggtctgcctctcgtagtgtcggattaccgctcacgcaagatactgaagcgtttccatgtgaccccgatcagccctgtcatgcttctggcagtggaatttgtgatctatatcctttacgccgcggtgtccatgctcacgctctaccccgttgcgaggctgttctggggcgtgacgatccgcggctcctggctcggctttctgggaagctggctgctcacaatggtgtccacactgagcattgggatgatggtgggcggcattgcaaagaccgccaaaagtgcgagcgtcatcgcctgcctgctctattttccgatgctgatcttctccggcgcgacgctgccccttgagattatgccggagattgttcaaaaagttgtacatgtgttccctatgacacagggtatacagctaatgaaagcgacctcccttggcctgccgatgggcggcctatggcttcccatcgctgtcatgggtgctgtcgcaattctctgctccgggatcgcggtaaaatgcttcaagtgggaatgaactcctaatatacattctcaatgaaaagctctataaaacggtttgaccagtggttttgacggcggtaccttaaaaccactggatattataattcaatttgcatttttaatattaggcggcctgtatgttccatggaaaaagcaggaaaaatatgacaattagttgtcatattatctttgttataatagaagaaaaatggagatgcattatgcaggaatacacaagtaaagaggttctggttaaggaaatagaaaagacagcagctcagtttatccgggagtttgatgacatagcggatagcgataattgtccgaagctaaattatcacttgttatgaatcggattttcctagagcttacttgggaagaacgagggctattatatctggtaaatcaggatatggcagacgatgagatcgcagaaattctatctgtttcaagagccgaattacgttacagggagtcaagctttgcgaaaaaacttaaaaaaatatgccaacagagcgaacaccgtgttctgccagatggggccagtaattgtaaaggagacaaaaagaatggataagatactgcgattttatgaaataatcaaagaggaaatgagtgtaatacttgctacgtcagcggataaaagagttaccatacggcaagtcagcccagtatattataatagaaacattctaattttcacggatccgggttccctgaaataccagcagctgagagtaaaccccaattgctgcattgctgccggaacgtattttgcagaagccagagctgagtttttgggggcaacgatgctggattccaatgaggaattacggaaggcttactgtgagaaatttccaggtgcatttgacgagggagtggatcttggaggccgggatgcggaatttattttacttaggccaaataagttaaagggatgggcctttgagaatgacattccgacttctgatggaacgcccacgattccctttgaaatcatgatataatttgtgtgcctatacgccaaacagggaggtgcgtttgcgagtggaaattccaacaagatgtcgttaagagtgaaaaaggcttcactgatagccgctgctggcgttgctttggtgttaatagcgattgtcactgcaaatgggtatataaattccatacagcaggagcataagaaaatggaagaaattgcagatatctttgaaacctatgagccatacggtttagtctatgataaggaaaaagaccggctgtactataacggggaacttgtccgctattttgaagctattgtgaatgcagaccattatttgaaatggcccaaccgggatgggagggtagatgtttacgcgaaaagaaatgcgtcaggagcgcttatcagcgtaaacactttccgctagcaggaattttcagaccggacaccatctttagaatctgccatatgtgagctggagatatgtaagctggagaccgtaaatacaatcaactgtgacggttatacgtcagaagtggaagaaatggtaaaggaacggattgcggaagaatatgaagtctaccagcagtatggcttaacttatgatcaagaacgcgatcgcctatattatggcggagaactggtgggatattttgaagatcaacaaatcggccattactttggacttttgatgatagttcactgaaaatatatgcagttcgggatagagatcataatttatcagggttagatgtcgatgacagcctaagtctataactgcttataatgcaatatccaatgctgcctgtacacttattaccgataaggttttgtataagaaaggaatattagtaaaatgttaaaatcagataaaagaaaatacggtgtagacttatggattattgctctttcatgctgtgtatcgtatgggattatgggcgtattttatatgctgctgaaatttgatatgggccagttcccgattctggtacagaccttaattggggcagggtttgaatttggttgtatggggcttgggattacgatagtctgtatccgcaataaagaaagttttgcaagctttggactgaaaaaagaaaaattgttatctactattgcgctgtcagcgcttgtttgtctgccgcaatttatctttgacttattaaccagtaaaaccgttacatattttccattgcagaatgtaaattttacgaaacctattttagcatcggatttaccggtaaagatcattggtatgctcatcatcatagtaacatgggggttctttgaaggttttacctatgtggtcatgtcagaccgcattaacaaaaggttttcttcttcaaatttattcctgaatgggggagctgttatatgcggaattttttgtatagtgatccatcttcttgttgggcaatcctatagtatgataggcgctgtaaccgagtttctattgatatatggaatgctggtcgtttaccgctatacggggaacgcatggggatgtgtgttgattttctgtttcttttggaacgggatcggcctatagaatagcaatttgaggaggataagcagaatgacatatcagtttattacgtcaatacataaggatgggaaccgttcttttgcacccataccatttaatgtttgggacgaaaccggacggaaagggaatataccctgccgggttgtgataggaacgctttcattcgagtgcaggctgattcccaagggcggcggcgcctattggattcctgtcaacaaaagtattttaactgctctatcgcaggaaaaggatgttgaagtcacgttggagccgatttctcagctgtcacgaatcaaccatgacagcccgtactcaaaagaatgccctgtccgtaaaatagacagtattcagcctattccgattcagccaggcttctgcggacagtgctgtgtggctatgctggccgggattcaattggatgatgtcatttccgtgatgggaagagggagagcttcctgggaaaagattttggagactttggattatttcgggattccttatgccgggaaggcggtctatccaagaggtaaagcttttcagtttccgagatgctgcattgtaaacaacgacaactcttttttactctggtatgaaggtgagtattacggagttcaggacgtggatcaaagtaaaaccatcggctatattgaaattttgctgccataagcggaagctgtgcggggatatcaatgtcagggctggtgctgataaatagaaggggttatggttattggaataagattgagaaactccccaaataggaaaagaatgaggttgattaaaagatgtacagcaaaaaaagaagtctgatcctattaaggagatgaagtgttatttgggcaggcccaaatggaaaagagggaatagaatggctgatagaccagatttaagcagagacatggacagtaaaacattccgtgatttttattatctaaaacaggaactggtggacttttgcaggaaaaacggtctgcctgtttctggaggaaagatagaaatagcagacaggattgcctatttcctcgatacgggcgggatacgggctgcttccacagcaaagaaaaaggcggcagccccatctgatattcacgaggacacaaggatcgaaccggattttgtgtgtacggaaaagcacagggcatttttcaagtcacaaatcggaaagagtttttcttttaacgtggtttttcaaaagtggctgaagaataatgcaggcaggacttataaagaagcggttgcagcttactatcagatccttgaggataagaaaaaaggaaaatcgaaaatagagaaacaatttgagtataatacctatatccgtgatttctttgtatacaatcctggcagaacattagaagatgcaataaagtgctggaaatacaaaaaaagtttgcagggccataaccggtacgaaccatcagatcttattgcaatgagtgatgcgggtggaaaggaaggctgtaatggatgttaggcggtcagtatcttgttagaaataaagatgtaattgcattatcaaattttttatataacaatacaagcacatatgaagaagagaataactcccggattatcgaagtaaaaaaggaatttgtttttacgtatcttaggcagataaggcgcagatgttgaggaaaagagagcgatgaaaaatttattgggggggggatttggctgaattcccgaatactgctcctatcttatacactggtatttggacggaacatttgcgctttccactatgcggacacaagcggtgtatgtattcttattgggccttgtgtttggatgggtattaaaaaaagtcaatctatatggccgccaatgctgatccatttctggagcgatttctcgtcagttttgtttattggataatggggcgggaaaaaattgtgtaaccggatcaacagattgctggaaaaacaatagaaagttgtgagaggaaggtgttaatattttatatacagataaacaaataacagttcctattaacggaacagcccaatacatatcgatacgatctgaaaaggaagatgcgccgttgctcttatatttgcacggcggtccgggagatgcggcgcttccattagtcctgaaattcaataaagagctggaaaaccattttactgtagttgtgtgggagcagcgcggggcaggaaaatcctattatcccttcacagaatacccaaaagttacaatcgacacatttatagaagacttgtatcagcttacaatgttcatactcagtcgctataaccagaaaaaactaattcttgtggggcattcatggggaagtgttttaggacttcgctttatacaaaaatatcccgaatgtgtccatacatatgtaggatgcggacaggttgtaaatatgaaaaaatccagtaggattgcctatgaatttgccatggaacatgccggcggtcatgtgaagcgcaagctggaggggattgattgtacttatacaggagatgactggcttagggacttgctttttgttacaaaacaggtggttaagcacaaaggttctctgtatggaaagcggaattataatgatttgatgatcccatttctgttttcaaaacaatatcatatctcagatttggtaaaacggcaaaaaggaagcctgcagtcaataaaatttctatggcaggagttgatgcagactgattttgagagtatagtacagtttaaatgcccggttgtgtttgtcgaggggagatatgacaagcatgtatcttctgagctgctggaaagttattaccatacgatacaatcagaaaaacaacttatctggtttgagaaatcctgtcattttccgcagtggagtgaaagtcagaaattcaaccagcttgttgctggattattgaaataaaattgaaagttgaaaggggaacttgtatagatgagcatatcatagaggttggcgaagatatgaaagtggttagaaactgttttcttgtttctgggatgactatggaagaagtgtctgtaaaaatggaagcttttattgaagatttaacaaaattgttgaacagctaaattgcagtcggacttaaaatttaaagaagcactggcagaagaaaaagaggcttctttttgtgaatgttccagacagggaatgatctatgttatggaaaacatgatgcctaaaagacacatagaagtggaaataatcgagacggttttaagtggggctgaaaaaatgtagatttaaagttactgttgaataataaaactttaattttaaggtggaggtcttgttatggggttttggatttttatgctgattatggacttgcttattccatttactatgataggttttggcaaatcctttttgaaaaatcctccgaaagaaataaatgcagtatttggatatagaacaactatgtctgctaaaaataaagatacgtggatttttgcccataattattgtggaaaaatatggtttatctgtggcctgatcttgctgcctatatcaattattgtaatggcaatggtgtttggaaagccagaagatacggttggaacggttggcggcgttctctgcggaatccaaatgatacctttgataggttcaattattcctactgaaaaagcgctcagaaaaacttttgataaaaatgggatcaggcgatgaacttggttttgtggaggaaaatgagatggaaaataaaaaagctcttaaactactttacggtggttcttccgttttttgcggcgcaatagcaggcatatgggcatttacagcaaatagatatcaaatatctgaaagccttttggttgtaattggtggcatgatagcgggtataggagttggaatggtatgccatgggatgagcgtgttggttaaaagataatgtagaatgtcagaaggagtgccgttatgcttgataagatacctgatacaaaggaaatgacagctttggttggacagcccttgtttgaagtctggacgaagctgtgtgcagccattgacgaaaaatatgatatggaatgtctctggaacagcggcggcaaagcatgggtttatgaatacaaatactgcaggggcggtaaaactttgtgtgcgttgtatgcaagagaaaaagccatcggctttatgattattttgggaaaaaatgaaagggcaaagtttgaagcagaaagagataactattctgaacaggtccaaaaggtttatgatgaagcgaaaacctaccatgacgggaaatgggtaatgtttcagccagccgatacttctatgtttgacagttttgtccggctgttgatgttaaaaagaaagccaaacaaaaaatataaatccctgcataaggagactttttaaattgaaagaaagccggatgaaaaaaatattaactttattgagacaaatgtaaatggtaaaatgctgtttacaaaggagttcgtttacgtcctggaaaatagtgcgctacagggcgtctacgtttatctcaatagagaaataaacccgtcaaagggcaattaacgggccgaatagaacagggattccaatcccaatgcgccttatcacctggaaatcatatccgtgagttttgcccacgaaaaatattgatctaaaatttacagaacaggagaataagaaataaatcaggttctggaaaacctgttataagtgttaacaatacaaaaacaatagaagtttatacaaaagtataaaaggaagaatatatcatacgatgtcatttgtttagaagataaagagaaaatgtatgcggatatatttcgtctgattgatattcgcaaaagataataaattccccgtttaccaagctgaaaatttgaaattttggaggtaaacctatgaaataagagacgagaatatagacggtggtaaatcgtttgattgggggaagatcagacaaaatattatgttctctcttcaaacagcaagacaaaacggggtcactatggaaaacgatttggaaatactaataaatagttaactgagagtatagcagagagaaagaagagaagtggagaatgaaaaatgtaataatcggcattgatctgggtggaaccaatctccgcatgggggcagtgaccccggacaacaagatgaaaaatccttcagtcatcaaaagcttttacattgaaaatgcccacaatccggtaaaaaagctcagtgagattattgagaagtacagattgtccaatgggatcgaggagatagaggccatatccatcggcgttccgtactctgtttcaaatgataaggagacagtcatctgtacaacgaatataagaaacagtgcaggggaagtggtatttcaaaacagaaatatcgcggctgagatcagggaatatttccaagtccctgtgtatgtgaacaatgatgtgaacaatatcctccagtacgatgtgacggtgaaccatctggaaaatcagaaaatcgtggcgggcatctatattggcactggtgtgggcgcttccgtgatcattgacggaaaaagcctggagggcaaggatggggcagagctggatctgggacatatatttttaacccggattccctggtagtgggaggcggtgttatggagatgaaggatttcccacgggaggcatttgagaaagcggtaaatgagaaggtgggcacagatgtaatgagatacggtttccaatatgtatattcagaggaatatgtgggaaaaggtgttataggagcaaccgtatttgccagaaacagattgcaggaagagcgtgggaaggaaagaatgataagctgaaatgcagaacagttttaaagcaccggtcaggaatggacgttcttaattttgagtggaatcaactaacaaataagctggcattcaatactagaatgccagcttatttgtgcttgtttatatgagagattctggatttagatcagcattgtcttgcaaaataataaagagaataaaaggaatgtaatttaagttagtttagtatgaaaaaaacagtggttcgtcagataggagtagagcatacaacaagaatgggatctcatacagctctctgtcttctgacatgcgatcaatcgacatattcggtggcaagacctctgagagtgaatgttcggatgaattaggtataggcatgttgtctgaaaaaggatgacatgcctttattgttgtaaatattataatggattaaaaactgactttttattatgattgacgagcagaaggctatccatgaagaaattgtattcatatcattaaaataggatgcttctgtagaagcgtataggctttcaggagagtgaaagagaaatccagcgtgaagggatatgttttaatgtcctggataaagaaaaactgaatgattatcttttatggatgggaaacgtaaaagtatagagtacgaaaatctgtaatctgagaatgaaagtcataaaattctttttatcttatgaattggaagaatgtatggatatcatccctgtttatgtatcaagcaaaatgatacattgtctgaaccagttagtctgaaaaaagtgcactcaatataaaagaagtgagtttggaattttctaaagaatgttaatattgttgtcaaagagacagataaaatgtatggaatatcatgggaggagtaaaggatgacagaagccggttatgttctgagtttgcagcacattagtaaaagtttcccaggtgtcaaggcattagatgatgtttgtattaatgttcgaaaagggactacacatattcttattggggaaaatggcgctggtaagtccacactgatgaaaattcttgatggcatttacaggatggatgagggaagcatcgaattggaaggaaaggcagtaaagattgaaaatcccaaggaggcattcaggcttggtatttcaatgattcatcaggagttgaattactttccggatatgacaacagagcaatatttttttcttgaaaatgaacctcagaaatttaagggatgggttgattggaaaaccattcgtgagaagatgacacagttattggaaaaggaagaagtgaattataaagcctacaccaagataagagagctctctgtatccgatcttcagctcctggaaattatgaaggccacatattccggggcaaaaatcataatcatggatgaacctacatcggcagtctcggagaaagatgcgcaaaggttatttaggaaaatagaagaactaaaagcacagggtgtaacaataatctatatttctcataaaatggatgaaatttttgagattggtgattacattactgttttacgggatggaaaaaccatagagactcgtgaaaaggtagatttctccagagatgaggtgattgagctgatggtgggcaggccagtggaccatgcttatccaaaggaacaaattgagattggagatatcttgtttgaagccagaaactatacaggggaaaagaattttcagaatggaaactttaatgtccgccgtggcgaaattgtaggatttgccggattggtgggggccggaagaacagaggtgatgagagcggttgtgggattggatgcacataagagcggcgagttgatttttaaggggaaaaaatttaaagcaaataatattgcagaggcaggtgataagggaattttgatggcgtctgaggacaggagacgctatggctgtgttccaatgagatctgtccaggaaaatatagctttgtctaatctaaagcatttttcaaagttcatatttattaagcataaacaagaatttaaagaatctgcccagaagatgaaagagcttaatataaaggcgccatcactgaaaacattcattatgaatctcagtggaggcaatcagcagaaggtcattcttgcgaaaatcttggtggcaaatccagatctgctgattttagatgaacccacacggggaattgatgttggcgcaaaatatgaaatttataaaataatgacggaaatagcaaagcgggggataggtatcatcatggtttcctcagaactgccagaattaattggaatgtgcgacaggctgtatgttatgcgggagggagcaattgtaggtgaactgggcggagcagagatgacacagacaaatgttatgcatttagctgcgaattgagggataatggggtaataaaaatgaatgataggacaaaagaaaaacaaaatgtaagatcaatgtttaaaggcttaaatgaacgctttgaattaacaggaatcatacttattttattgcttattattattgtcagtacatgtttaagcaataagtttttaagacctgtgaacatatttaatattcttaggcaaagtagcgtcacagcaattttggcttacagtgagaccctcctgattatcatggggtgtattgatctgagtgtgggctctattgccgcacttggaggtattttcggtattatggtatatgcaaacaccggaaatatgcttttggcagtcgttgcagccatatttacaggggggatgatcagctttgttgccagcttgttcattgcttttctggatgtgccgccatttattgccacgctggcatcaaatctggtggtgaggggatttgtatacgttgtcacaaagggacagccagtggtacctgctgatgggtttagtacatttggtcaggggacatttttaggatttttaccttatattgttgtggtgatgttcacggtcgcggttattatctacataattatgcatcacaccacacacggaagacggatttacgcaattggaggcaataaggaagcggccaatgcaagcggtgtaaacgtggggaaggtaattatcattacttaccttatcagcggtatgctctgcggtcttgccgggattatgactgtcagccgggttaattcaggtatgcccactacagcgttggggtatgaaacagatgcgattgcagccacggttatcggcggcacatcctttacaggaggtgtgggcaatccatggggaacagtgatcggagcatttatcattggaataattggaaatattctgaacctgatgggtgtgtattcatatgtacaggatatttttaaaggtcttatcattcttatggcagtggtgattgacctgagaggaaaaaggcggaagaactgagaacagttgataacatatatcaccagatatatgaaaatataatatttcaaagtctaggaggaaaagaaatgagaaaaaatttgaggaacctactgatggtggctgttggggtaacaatgttgttttcatccacggtgtttggaagcgaaactgctgacaaagtggaaaaagcagatcaggtgaatgtgattgaaacaaagcctggcacagcggtatatgtgggacgtgctctcagcgatcctttttgtacaaagcttggcaatcgattttctgaaatgatggagacctattatccagattgggaatatgtggttctggatagtgagaacgatccggagaaggaggcgactaattacgagaccttgctcacaacactggaaaaaggcgatgtggttctcgtcacggtattatctggaacagatactaagccgtatattcagaagctgaaggatgcaggtatcatcgtcgtatccatcaatattacggcggacggcatttgcgccgccacagttgcgaaagattatgacatgggttatcttgtgggatcttatgtgagagatcatgctccggaaggaacaaagattgctatgatgaatggcgattcagggtatcagcttagttttgagcgtcgtgatggtatgatggctgccattgaagaacgtgacgaccttgaaatccttgtagagcaggattgtaaattcgataaaaccacaggtatggagacaatggaagactggcttcagctttatggcgatgaaattggtgcggttattggaggaaatgacggtatggtgcttggcgctgtggaagcgtacaagagcagcggttattcactggatggtaagctttttgtggggattgatggtctggcagacgcttgtgattctattgaaaagggcgagcagacagcaagtatcctgcaggatgccaatgcaatgatcggattgggattagagcttgcaatgcgtcagacggctggtgaggaagtagaacagaaggattattacacagacagtgttgttattacaaaagagaatgttgcacagtataaataaagctgtttctttaatgggagattataaaaatgaagattggtgttgaaagttttactgtaatggacgaattttaccaggatttttatggaacactgaaaaaagttcaggatctgggactccattatattgaatggatcgcaaaaattaatggcgagggagattacggcctgggacttggtctttcacctcatgaagcagtaaccgcttttgggaattatggtatgaagctccagggaagtattctctggcttcaaagcccggagcttcataaaaaaatgatctttgactatgacaaaatgcagaggatcatagactggtacgcagaggctgggtgcacacatataggtcttgccggtgattggtttgtaaatgaagaatatttcaaaagacgtatggaagcatacaatgagcttggaagacgctgcgcagcggcaggtatggtatggacgtatcacaaccattttcatgagcagcagaaaattaatggaaggtctgtcctggacctgatggttgagtatacggatcctgacagtgttggattcgattgggatgtgtattggggcgtaagaggtttggtggaccctgttgataacatcaaaagacttggaaataaaattaaatgtatgcattgcaaggattttccgtttagcaggcttgatcatattaatattgttaaagaactgccagaggaccagttggttagctgggaaaatgaaaataaatttgcggcctaccagttggttgtaccggaggattttattgaagtgggaagagggattattaaatggcaggatgttattaatgcggctaatgaggtgggtattccatatatgtatattgaacaggattatacccaatatgcggataagtttgatagtcttgctgcatcaaaggagtatttgcttaaacttaggggattagaggttaaataaagttttataaacggaggatagagaatgaatacgacagtaaaaagacagacagtgaatatagctcttataggctgtggatttatgggaaaagagcattcaaaagcctatgctttagcaccggtaagctgtccggatatagccgccacacccgtaaagaagattttgtgtgacgcttttcccggtgcggcggaacagaaggccagattatcgggatatgaggaatattgtacagattatcatgaaattcttgaaagagatgatattgatattgtggatatctgtacacctgcgccaagccatggggagatcgccattgaatttatcaaggcgggaaaattcgttgcctgtgagaaaccactggtattgacaaaagaagacggcgagagacttttagcagttgtaaaagaatacaatggaagaacggctacctgctttaataagagaagatggccggcggtgggctttgccagacaactgattaaagagggagttattggcgatatttatctttataacggaagatatgtccaggattgtctcagtgcgatcgcaaacagaggtccacatgcttcaggtggcggttttgctgattcaggcagccacattttagatatgtgcagatatatcctggatgatcaatttgattctgttgtagccagaacctatcagcttgatccagatggaaagaatgcggatacctcaaaacgggtaaatgatgaagaaggttttgcacttgtattagcacaaatgaagtcgggggttacggcatccttgtatgagacatacgcttatagcggaacgggtgaggatatatcttttgaagtaataggttcaaaaggcagtatgaggtggtccggggccaatccctctgtcttccagctttcaattaaagatggggacagcagaaccaatggctttagaaatattttaatgggaccggaacatccttatggaaacagtgttcccgttctcccaggatttggcgttggtgtggcggacaatatgtctttccaggcatacgagattatcaatgcttattgcggaaaatatgactatcatccaagttttgaggatgcctgggagattataaaggtttgtgatgatatcagaacctcagaaaaattaaagcaatggataaaatgctgttaagtactcatgataaggataacgtatatgatagctaatgaaagactaaatcacttattgcagaattttatttcatcagggataccaggctgcggtttggcggtgagctataaagggaaggttgtgtacacaggatattgcggagtgtctcagatagagaataataaaaaaattcaagaaaatacagtttatcggattatgtcctgtacaaaaaattttactgccgcagccattatgaaattatatgaggaaggacggctgctgttaaacgatcctttagagaactacctgcctttttttaaggatattccctatcagacgtttagcgcggccaacgaaagaattgttcagagaacaaccagacctatcaggataaaagatcttctgctgatgacttccggtattccatatggcggcaaaggttcatttacggccaatgactatcttgagaaaattggcaatgtatatgcaccctcaaccatggagctggcgaaaaaaatcagtgagatacccctccagtttgagcctgggtctcactggcagtatggaatgggatacgatgttctgggggcggttgtggaggctgttacgggagaacgtttcggagaatatttagaagaaacaatatttaaaccactgggcatgaagaatacgggctttatctgcaccaaggaaatggaagaaaatttggcccgggcctataacctttctttgggggaacctgttatcgatgaaactgagccgatcatcagggaaggcagcacactaaaagcggaactgggcggtgccggtctgtattctaccctgggggatcttatccggtttgccggtatgctggggcagggaggcacctgggagggtaagcgtatactcagtagaaatacggttgatcttatgcggaaaaatcatttaaagggacagcctatggaggattttaaacaaatggccagagaggcctacccatggtatgagggctatggatgggggctgtgcggcagaacattggttgactgccaggaggctggaagcaatggatccattggtgagtttggctggagcggaatgtatggaacctatatcatggctgatccagaaagaaatcttggagtagcatatgtgcagcaaacatttccagtgattggcggtaaacaggattattgtcatccgagaatcagaaatgtagtgtattctcttctagatgagtgggaagaataccaaaaaggaatgaaaacatcatgttaagaagattagtaaatactccatcctataaagtggaggagatgctggaagggtatgcaggagcttttcctgatttttatgagcttcatcccacggtaaagggagttatctatagacaccatcgtaaagggaaggtagtgctggtctgcggcggtggtgcaggacatgagcctatgtctatggggtttgtagggcaggggcttaccgatgcggcagtctgtggaaatatgtacaattcgccagatgcggaaagcatttataaaatagctaagacagttgagtcgggaaaaggcatactgttcctttatggcaattatatgggcgataaaatgaattttgatgcagctgaaaaagagctgaattcagaaggaatccttacacggcatgtatgtattcatgatgacattgcctcagcgcccattactagaaaagaagagcgaagaggcgtcatcggaggtgttttcttgtacagaatagcaggtgcagcaagtgatgccggtatgcatattgatgaaattgttcaactactggagaatgccggtgataatgtgtggagcgtaagcgtggcagtaacagaaccaggcaaatattcaaaaaaaggtgtaatgactcatggcataagtgatgtttatgttgactatgggattggcctgcatggtgaatgcggaattttatcattaaaactgtctaaggtagatgatttggttgacaaaatgtacagccagattatggatgaggcagatctgcccaaaaacagtgaggtgtgtgttctcgtcaacggtctgggaacaatttcctatatggaattatatattgttttccggcgggtaaaacagctcttagaaggtgatgggataagaatctatgacgcagacattaataactattgctccagctatgcggcagaaggattctcaatcgctctgtttaaaatttccgatgatgtaaagaaattttataatgcttcctgttacaccccctgttatcaccatagagttatggtttgccaggagggtaatgaaaggaagagtataactttgcccagaaaaacagaagaaaatacaggtgtttcatcctatagacctgtagaaggaaagaaaaagatccggacagaaatggaaacggaacagttcagagatatgatgatctatgcagcagaatgtcttatccaaagtgagaaatatctatgtgagctggacagtatgtttggagatggggaccatggtatttgtattgcagatggtatgagaaaggctaagaagcaattaatgactttgacacaagataataagccatgcgatatctgtgatgggattggtaccgcaatgatggttattggcggcgcctccggggttttttatggaaatatgtttaaggccgcggccagggcagtagaaacgaaagacgttctatgcactgccgattttgcacagatgtgggagatggctttagaagctcttatggaaaaaggacatgcccaaaaaggcgataagacaatggtagatgccttggctccagcagtagagtgtttgttggcaaatacccataaagagttcccgcagatcttagcattggctgaaaaagcagcagagaaggggatgctggatacgaaaaagatggctgcaaaatttgggagagggaagtttcttacggaaagggcatacggctgtcaggatgccggggctacggcaatttggattctgtttagaagtatgtatgagtatctgggacctgttgaagaagcgtaggatgtgattttactaattatttatgctgaatatatttctgataaaagacgaatttaatacaggcagacgcatttcagaattggttgaggaagccggatatggatatgtgtcatggaattggcagaaccgtttaactattctgagcgatattgaactgaaaaagccagatattgttttgctatgtgtggaagttattggcaatgatagatataacacatttgaatttctcaaagaagtacacatggctaatacatcttctctaatactggtggttgtccctaagcgtagtattgatctatgcggcatggccattgattcggatacagattgtctgctgagtattgatgaggcggagcaggtgttggacaaggttctccacagaatggaaagaaaaagggataccatagcgaaacaatatgccgaaatgagacattatttattctcagcttttgtgaaggataagggcaggataaattatgaggagcatcgagaactgtttgcagagtatgaaaatgaaccgttttttcaaattgtgattgcccatgtgctgccgccatatagaaaaagaaatctattagatgaaaataatgttgcgactctaaagggctatggcattctagaagacagattaaaaaatattaaaaaatatctcattacgaaagaccggctggatgtgatcatatgtctgattggaaacagcgatgagctggaaggggcaagattacagctggataagtatataagggatatgcaggaaatgaatgttacgcttacaagggttgctgcatggctgtgttttggggagattgtcgaacggatagaagacattcctaaaagttattcctcggcgtgcgcattattaaatacccggttttttggaaaaagcatacgattgttggagatgggggcacgggatgaaaatacaaaaggcttaaaggaacaattttggatttatgatgtaaggaaatctttgacgaatgccttagagaccctggatgaaatggttatccataaatcgctaatgcagttgaaaagcaatattagcagtgctgtaaactttaatgaagaagatatatctgttatatacagaacccttgtctccgtcttttttaaagaactggaaagcagagaaattaatctgtcggagtattcgattcattatgacgctctgttaagagaatatgattttttctggaatctggaggatttgttcagtaatctggaagggctttatctggaagggattcgtattttaaaagaaaaagaggaaaaaagctcaccttcagctattattcaggctaagcgttatatcaggtcgtattttaacatgccattaacactggaggaggtcagtgattacgttggtatgaatgaaaattatttttcagattattttagtaaatatatgaaaatgactttcaaacaatacctcacagaactgagaataagatattccaaacagcttctgcttgacagaagatactccatggaagatattgcggaggctgttggctacaacgatgtaaaatatttttcacgagtattcaagcgtgttgcaggcattactccgggagaatacagaacaagatactatgtgaatgcagatcattaactgcacacagagatggtttaccaactagtaaaaaagaggtggaggatgaaagcagcggtatatgaaggtgatcatgagataacaatcaaagaaggaagacttatagcaccaggaaactatcaagtgcgccttgaagtagcctattgcggtatctgtggatcggatatccacatattaagtggaacggaagattcccggattcacataccatcaatcatagggcatgagtgttctgggattgtggcagaagtgggggagggtgtaacacacttgaagcccggtgatcatgccgtagtgatgccggtaaaagcctgtggtatatgttccgcatgtagagcaggtttcggacatgtctgcactcatttaaaggtaaggggaattgagacagaaggtgcttttcagtatagttggacagtggatgcagacgcagtatttaagattccggattcgctggatcttaaatatgccgcactggcagaacctctatcaatctgctgccatgcagtaaaaagagggcaggtaaaggagggggattctgttgttgtgatcggaggcggacctattggactgatgacagcgattgtggcaaaagcggaaggtgcagaggttgtgatctcagaagtgaatgagaatcgtttggcaaaagcgcgggatatgggaataaggactgtaaatcctttggtggatgatataaatgaatatgtggctcgcaagacaaatggtgcaggtgcggatgtggtatttgaagcatccgggtctcaggctggtgtagatactatggtttttcttccgaaagtaagaggaaaagtagtacttgttgcaatttatggacgtcctatgacggtaaatttgaaacagctatattattatgaaaaagaagtgattacttccaggatgcagaaaaaggaggattttcaaaaggcagtggacttattgaacagaaaattgtttgacccgggacaaatcattacgtctgtactgccaataacggaaatcgccaagggatttgaaatttgtgcagacaggaacagcaaggaagtgaaggttatcatagactgccatttggactaaagcattttgcaagggaagggagttgaaaatggacgagaagataaaaattaagatattggatctggggcaaattacgtgccggaaaaaagaattaattcagactaagatcgatgacgccaggattctatcacccatggaagcagttctgataaagcatccagacagggggtatattctctatgatacaggaaacgcccctgactggaagagctcttatacaaagtctattcaacagatttatcctattacagaaatggttagtattgagactgctttggagaaagaaggattgacggtaaatgatatagatgttttgattctttcacacttacattttgaccatgccgggggattaaaattcttttcccatacaaaggcaggtgcacatgtgattgtatctgaagatgagtataaggatgttatgactaaacttgccacgtgtccagatcataacagcggagcatatataggtaagctattttataatttgccgggaattaaatatcagacaattggagatcgatttgaactggcaaaggggatcatcttatttgttcagaagtgtcatacggcgggagtgattggtatgatcatcaggctgcagaatagaaccattatatttacaggagataccgtatatctcacagatacatatcaaaaggaattacctccgggaggcggaataaataagacagaaaaagaattttttgacaatctaaaggttcttaaaaatatgcagaaggaattaaaggctgaactattttatggtcatgattatgaacaggcgaaagcatggagagaaatgggatggattgagtaggggagcttcagataaaagagggaatacatatgagcagaaaaataattaatcatccggatcatgcagtaagtgagatgatgaatggatttatcagtgcttttggaaaatactatgtgaagcatccactggtaaacggcgtgatttccaggcaaaaaagaaagaacaaggtagcgctggtaattggaggcggcagcgggcatgaacctatgttttccggatttgtgggaaaaggattggcggatgccgctgcgtgcgggaatatctttgcatcaccggatcccaatacagtgtatcagacagcaaaagcagtatcccaggaaaagggcattttatttgtctatggctgctatgcaggagataatcttaattttgatatgggggaggagcttctcaatgcagaagggatccctaccagacatgtccgggtgtgggatgatgtggcatctgcaccaagagaacgaatggaggacagacgtggtatagcgggagatgtgtttgtgatcaaggtggcaggggcagcctgtgatgccggattaaatctggaggaagtgacgcatgttacggaaaaggcgagggataacacaaggagtatcggtatagccacagcatctgcccagcttccaggaatagacagaccgatttttgaattgggggaaggggaaattgaatatggtatgggaattcacggagaaagaggaattctgcgtaccaagtggcaggatgcggatgtgctgacagagaaaatgtacggggagcttatggctgatacagatattaagcccggtgatgaaatctgcgtattgattaacggacttggctccacaaccttgctggaattatcggttgtgtaccgtaaggtaaaggagcttctggataaagataatattcacatatatgattcagatttgaacagctattgtacaagccaggaaatgggtggattttccatatctgtcatgaaattggatgaggaattaaaattgtattatgatatgccctgccacagtccattttatactaggggctgcttggatagcagccatataataaaggaagagaatggattattgatagaaccagagtttgatgaaaaggatgtggacgagactcctgttatcaggagcaaagaaggtacgctggaagagttatcggcagaggatgccagaaatatgctgctttttatttcaaacaaaattattgagaagaaggattttctgacagaggtagacagtgccattggggatggggatcatggcattggcatggctgggggcatgcaaaaggtaaaacgtgcacttcttaagttagaacagccccaaaatgtatatgaaatttttgaaaaagctggaaaggcaatgctcatgtctatgggcggggcatcaggggtgatttttggaagtttgttttatgcaggggcagaaggcatggaaaaaaagaaaactttatatccagaggattttgcgaaaatggaaagaaaaagtctgcagaggattcaggaacggggaaaagctgctgtgggtgacaagacaatggtggatgccctggaaccggctgtagcggccatggaggcatctgtggataaaggattgctggaaatgcttaaagccgcagaggcggccgcaaagcagggcgttgaaaacacgaagcagtaccgtgcgaaatttggacgtgcaaaatctttgatggacagggcagtaggctatcaggatgcaggtgccacatctgtgtggcttattttccagggaatgcgggaatttgtagaaggatagggggccggcccatgaagcaattgtattttggatccaatttaaaaatgtacaaaaatacatatgaaaccatgagatacttaaaaaggctagaagatcttacaagggatttggatagagaacagctcacaatatttattataccatcttttactgcactggattgtgccgcgcgagaaattgatcagtctttaatctggctgggtgcacagaacatgtgctgggaagaatggggacagtttacgggggaaatctctccattaatgcttcaggaattgaatttgaagatcatagaactgggacattccgaacggaggcatgtttttggagagacaaatcagatcatagataagaaagtacaatctgcgctatcccatggttttaccacacttctttgtgttggtgagacacaggaagaaaaaaactataaagttagtgacgaagtgctccgcatgcagctaaagatggggctgaaaaatgtaaagccagaacaaatcagtcatctttgggtagcgtatgaacccgtgtgggcaataggagtaaatggaaaaccggcacctgccgcttatgcacaagaaaaacatcatgtaatcagaaaagctctggtagaaatttttggagaagctggatatagaatacctgtattatatggcggcagtgtcaaccaggaaaatgccaatgagcttattgtgaagcctgatattgacggactgtttgtaggacgcagtgcgtgggaagcggacaagtttaatgagctgatacgtaacgctgttggcgtttataaggggagtgaagaaggaaggggtagtgtaaagcagccggttaaaaatgggtgctgaaaaaatcagctacaattacggagggatgaaaatgaagattgctgtaggcgctgatcccaatgcacgggatgcaaaggagcagatcatcagatatatccagtcaaagggatatggggaagtggtagactacggaagtgaggatcccatttatgccaatacggctattcgagtggcagaagcagtggcagccagggaatgtgagaggggaatcctgctatgtggcactggtatcggagtttccatagccgcaaataaggtgcagggggcatatgccgcactgctcacggatgtttattccgccaagagagcacgactgagtaataatgccaatattgcatgtatggggggatttacaacaggtagtaaagtgagggaagaattgatagacgcttttttaacaaatgaattcgtaaaggattgtccttcacagctaaaggttaatgcatttgtagattatgataaaaagcgatgtttcaacgcttaatttggggctgtcgtatcagagatggaaaaatcaatggtacaacagccttttttcagtaataaatgattagtaaatctcatgatttactgtaatgggttaaggatcattctgcatccttttatcaggcacaataaaactgttgatcgtgccagtgttcaaagtggtagggatgattttttgtaaggtattgatcagagtataaaaaggtaacaatatccatatcatcaaaaagatcaaaaggccattcatcccaatcacaatacagatcgtcatcttctgactgcagatgtgggagtatgttttccatcaaaaactctgattccctcataactaagtaaagtgtcaattcctctatcactgtatgggcaacaaaacattctttgcttgcagcctggtgtcgataatcaataagtacggcctttaaattatacagaaaatcataatcatatttcatgagaaattgaggaggcaggctgtcttccagccaggagagctctaactccccaatatgagtcccttttggtttacaagaaagagcgcttaaatcttgttcaatattatctaataaaatatcacttccaattacaaaggaaatggcggccgcatcccccagcacatcagccagggcttgtggccatattttgctgcatttgtatgcctggatatcaaattcgggtggattgtcttcttgggtgggtaatgtatgccaatttagtgttttacaaatgctgggtactttgtcacgtcgaatggattctccggattcatatctgctccaagttttggtaccaacccctgctttggacgcagcttcttcaattgtgaaaccaagttcatttcgtcttaatcgaattttctttcccaactcttcactgccttttacaatttttgcactcatagaagcctccttatctatatcaaaaaatgacatgtaactttaatgtcattatatcagtttttggaactatgtcaagtagattctgttggagatatagtttctattatctatagcaagaaggcaatggtctccaatgcctaaaccggtgagggaataataagctaaagcttcttgctttattttagagtatttaccttatgtgttgacggatcgcagatctggaaaaaatgtttggcattcagattgaatgatagaaaagcaggttacagcatgatataattggactaaataatccagtgatcaacgaggacttatagggggagcgatgatgaaggtatttaagagagctgttctttatcttatcaggaaaaaagcacgtagtattgtgttgttttcacttctgtttcttatggggcttttcatgttggcaggtttatccatttaccatagtgcagatcgagcggcagaggatatgcgtaaaagtatatcctctggtttggaaattaagatggatgcaatttcaggtgaggagatttatacagtcagttataatggagatggcgagctagtgcgtactttgaaacattctcttattacggaatctgttgcaaaggaactggcatctgtttctggggtcagcggttattatagtgaaatgggtgctgaaatgttatatacaggacttaatgtagttccgggagcatatacagaagaattaaagaaactaggggaaaatgaagaaacggcggatttacaagaaattgcaacttctagtgcatggagcaaagcaaatgattttcacgtggtacaagaaagtgaatattatccgtattttagaaatggtgcctttgagttaatcacagggcggcatcttcacatggatgattctgggaaaattcttatttcagaggaacttgcaaaaagaaatggacttgttattggagatatcataaatggacaaaattttgatcccgtaaccggagaattttatggtgagatatacaatgcagaaattgtggggatttttcgtattaattttgaacagcagctttcccaatggactgccgaaccaaaaattttagccaatacaatttttgctccatttgaaatgcggcattggggacaacgtcaatatcatactttttatggaggagatatacttgcaaaagaggaggaccggttacttggaagtgttactttatttgtagaagatcccgatgatttggatgaaatagaggcacaaattaaagaaaatgaacatgtggagtggaaatattatacaattcagcgttatgatgaggattataaagctgctgcaaagccgcttcttactatgacactgctggctgcctgcatggtagtgattatcattgtcagcactttgctaatcctttccttggtgcttgccatgtggatgcgaagcagaaaacacgagattgatgttttaacttttcttggtataaacgcacgaaggatcattactcagttttttatagaaatgggcattcttgtaataattgcattttcaatgtcatgtttatttgctccctctgtaacaagtgttatcggaaatacgatgacagaatttacgaatccctcagaagaaataggtgcttttagtaccacatatgaagagactacggggatcactcatataaacaggacatcgatgaaacaagagccgcttacttatgagcgttcatggggctcatccatatggacatttttgtctatggtatttatttcctttggaacagttgttttagcgtttcggagaatgcacaatacagcttggctttcccataaaggttcctatattcaccactggaatttgtgtagaatttccggcaagggaatgatgaaagcacatcaccgggcacttttatatgtaacaagaaaaacaggaaaaagtatattgttattgctaatcttattcgtcataatgggattgttcttatctggtatttccatccgtggggcatcagagcatgcggctgaacagctaagggaaagtttgggaggatattttaaaattgctcccgattatcaaaaaagcgaagtggagaatcaaattgatcaggagttggtgaatcgtatcacggaatttagtgccattgaagctgcaaatgcaatggacgtatgctatatggatgttcaggatctttcattaaatcccggaaaattttcagccgagaacgatgaaaaagccatgatgacaaggatattagggaatacagacagcagtttgcaagaatatttttatcttgaaatttttgaagttatagaaggaagacatataacagaatcagatgaggggaaagcacttatttctagtgaacttgcccagagaaacaacctgagagtgggagattcttttaccataagtacgtcgggggaggatataggaaatggtgctgtagagaagaaatatgttttagaaattataggattattttcggaaacacagccaagttcaagtatggcattacaaacgccagaatgtgatatacctttgaattttatttttactgacatatgtacaacacagcagattatgcgagatgtgcagccagggcaaaaacaagtttattcaaacggtgcagctttttttgtaaaagatccagaaaaattggaggatgttattctgaaaatagagaatgagattattgacaaggatttgacaaaacttacagtcaataatgaagcatatcaaagcagtatggaaccccttcgccggttgagtaatatgtcattgataatgcttgtgattattgtaggagtcggtgtgatcctactcacattgattttaacgctgtgggaacgtgaccggattcatgaaacgggtattttgatgtcctttggtattgggaaacgcaatatttggtggcagagattcatggaatgtgcatccgtatttataatttcacttattatttctgttgtagtatttttgccagtttcatcagaaataggcgactggttttatgaacaggcttctgcaaggatagagcagtccatggggaatgaaatgaaagatccaatgatggcgtgggaaacaataagtacacagtccatggagaatgatattaggttccaggtaaaagtatcacctatgattatcatactttcaggaatgggcggacttgctttggttgagggagctatgagtatggcgtttgtttccaatgtttatcataagccaaaagaattacttgctattatggaataaagctaggaggagtatatgagtgtattggaatttgatcaagtgtcctattgctatgataaaggaaaaacaattttagagcacttacaacagaaatttgaacgaggaaaaatttatgtgattcttggtccctccggttgtggaaagacaacggctctttctcttttgggaggtcttgatctgccgaagcagggaaggattctttttgaaggtgaggatattctgaacagagggttggaatatcaccggcgtgaccatgtttcttttgtttttcaaaactataatttaattgattatatgactccggaggaaaatgtaaaactaactgctgatcaagacgcgatcccaatactggaacgggtggggttgtccaaagaggagtgtagacggaatgttttaaaattatctggaggacaacaacagcgtgtagccatagcacgtgctctggcatcagagaatccggttattttggctgatgagcccactgggaatttggatgaagatacagcgctagagattatggcattgtttcgtgaagctgcaaaggaatataataaatgcgtcattattgttactcattccaatgaagcagcgaaacaggcagatgttgtgcttgtgttgaagcagggtaaactggaagtcacaaccctttgctgatacagttagtgcgtaatttgtgagctaatgtgctataatgctgagaatataattgaatttctttcagatcaagataaaaaacaatggaaagaagagattacgaatgatcgtttacgatggattaaaaacggattttttaacaagctgcgaaaatgactctattgcaatggaaatagagaaaaatgtgcttgcaaaacttggacgacacacatctagatcagagattcgttcttgggaaaattcattaaattatatgtacaaagtattgaatgatgatagaattccttctgattcaggtgttgccatagaatttaatattccccagacttcaaaacgagtggatttcatgatctctggatatgatgagaagaatgaaccggaaatggtgattgtagaattaaagcaatgggaatctatggaggaagtaaaaggaacggatgcgcttgttgaaacctatacaggtggtgcggtccgaagagttgttcatccgtcatatcaggcttggtcatatgcccagttgatccgtgattataatcaggcagttcaagacagaagagtaaaactatcgccttgtgcatgtcttcacaattatattcgtcatgaaggggaccctattgatgcagagcaatatgaggattattataaggaagcacctgcatacacaaaggggcagttaccgcagctgagagcttatattaaaaagtctatacgtaaaggtgacagaaaagaagtgctatatctggttgatcatggtaaaatcagaccctcaaaaagccttcaaaatacaattgggtcaatgttgaaaggcaataaagaatttattatgattgacgaacagaaggtggcctatgaagagattcttagattgtccttgcagactcagaaagatctcaaaaaaagaaccattattgtgcagggtggaccggggacaggaaaaactgtcatagcggtaaacctgctggctgaattgacgcagcgagaccagatggtacagtacgtatctaagaatagcgctccacgtcaggtatatctgaaaaagttaaaagggcaaatgaaaaagagcagtgttgataatatgtttaagagctctggaacatatacacagtcagagaataatgtggcacatacattgcttgtagatgaggctcacagacttaatgagaaatcaggcatgtttcgtaatcttggtgaaaatcagattaaagagattatacatgcagcacgttgcagtgtgttctttattgatgaaagccagagagtgacaatggatgatattggatctgtggcagagatagaaagatgggcaaaagaagaaaactcggaagttcattatctggagcttcgatctcagtttagatgcaacggctcggaaggctatttggcgtggctggatgatgttcttaatattagagaaacggcaaattatgatcttgaaggaattaattacgatgttagggtttgtgattcgcccaatgaaatgagaaatcttgtgattaaaagaaacagaatatcaaatcaggcaagaatcctggcgggatattgttgggaatggataaaaaaggagaagaataatacaaactatcatgatattaaaatcggtgactttgaaatgagctggaatcttggaaatggagaaccctttgcagtaagtgatacttctattaatgaagttggttgtattcatacatcccaggggttagagttcgactatgtaggagtaattttaggtgatgatatacggtttgaaaacggacatgtagttacagactttacaagacgtgcgagaaccgatcagtccttaaaaggaataaaaaagttatacaaaaagtcgccacaagaggcagtcacgaaagcagatgagatcattaagaatacataccgcacgcttttgaccagaggaatgaaagggtgctatatttactgtacagatccagggatgtcagcatatttaagaaaaagattggagatagtaaagaaatgaaacaagaaaccatagaacgtattagaaagttttcggatgatagagactgggatcagtttcactcgccagccaacttggcaaaatccatagtggtcgaagcagcagaattattggaatgctttcagtggagtgatgaaggatatgatattcagcatgtaaaagaagaattggccgatgtaatcgtatatagtcagaatcttttagataaattaggccttgatgtggatgagatcgtgaacatgaaaatgtcccagaatgaagcaaagtatcctgtagagaaagcaagaggcagtgcagtgaaatatgaccagttatgaaaaggcgatggaggataaaacattaaattattacaatcaaaatgcctacacgtttgtggccaatactatatctgtgaattttaaaaagactcaaaataactttttgagccgattgcgtcccggaagttgtattcttgattttggttgtggatccggaagagataccaagtatttcctggaggcgggaatgcaggtagctgccattgatggttcagaagaattatgtaagatcgcaagtgaatatacaggaataaaagtaaaacaaatgttgtttcaggaattggatgaacaagagaaatacgatggtatatgggcctgctcatcaattctccatctgccaaaaggcgaattgaaattagttttgcagaggatgcaagaagcattaagggacaaaggtattatttatacatccttcaaatatggagaatttgaagggatgagaaacggcaggtattttacggattttacattagagaaatttaccgagtttattcaggatgtggagcagctaaaactggaagaatactggattacaggagatgcgagacccggaagaggtgaggagaaatggctgaatttaattctgcagaaaaattgaatatggattttgcggaagattattctatcgatgtaatgactggcgatagagataagagaatgtatctttattatcagttgataagaagtttaaaaaaggctgatcgtgtggatatcattgtttcttttttgatggaatccggggttaagatgttgattgatgaattaaacaatgcactgaaacggggagcgagaattcggattctgactggaaactatttggggatcacacaaccttcagcactctatttgattaagcgaaagcttggagatcaggttgatttgaggttttacaatgagaaaaaccgatcgtttcatccgaaatcatatatttttcattatgcagatcatagcgacttgtacattggttcatcgaatatatcgaaaagtgcgttaacttcagggattgagtggaattatagatttagcagcaagtgggacccggccaattatgagaagttttttcatacgtttgaagatttgtttgaaaatcattctattgtaattgatgatgacgagctcaggagatattcaaaaaattggcatagacctgctgtatcaaaagatctggacaaaatagaggagaacgaagatgtaccggaagatacaaaggtacgtgtattatttgagccgaggggcgcacaaattgaggcgttatgtgcattagaagatacgagagcagaaggagcaaaacgggcgcttgtttcggctgcgaccggggttggaaaaacatatctggcagcatttgattccaaggattatgagcatgtgttatttgtggctcacagaaaagaaattttaaaccaggctgcaatttcatttagaaatgtcagaaattcggaggattacggcttttttaatagtgatgccaaatgtacagataaagcagtcatttttgcatctgttgcgactctgggaagagcagaatatttgaacgataaatattttaaacagcagtattttgactacttggtgattgatgaatttcatcatgcggtcaatgagcagtataaaagaatagtagagtattttaagccaaagtttctgctgggtctcactgctactccggaacgaatggatgggagaaatatttatgaaatctgtgattataatgtgccatatgaaatttcactgaaggaagccataaataaaggaatgcttgtgccatttcattattatggaatatttgatgatacagattattcaagacttcatattgttcgggggaaatacgatgaggaggaattgaataagacgtatataggaaacgttcatcgacatgatttgatttataaatattattgtaagtatggttcaaaaagagcgttggggttttgctgctcccgggtgcatgcagaggaaatggcgaaggagttctgcaagaggggaattccttctgtggccgtttacagtaatgcagatggagaattttctgaagaccggggaacctccattgaaaaacttaaaaatggggagatcaaggtaattttctctgttgatatgtttaatgaaggggtagatattacctcagtggatatggttatgtttttgcggccaacagaatcaccgattgtttttttgcagcagcttggcagaggtcttagaaggagcaaaggtaaagaatatctgaatgttttggactttattggaaattatgagaaggccggacgagttagatttttgctcacagggaaagcactgtctgagggggaaccgtataatccggcagacaggtcattctttcctgatgattgtttgattgattttgatatgaaactgattgatctgtttgctgaaatggacaaaaaacatcttaagataaaggatcaaatcagaaatgaatatttcagagtaaaggaactgcttggaaagaaaccttcaagaacagagctctttacatatatggatgatgatatttaccagatagccatcgctcattccaaagataatccgttcaagagatatatggaatacttaaaggaattaaatgaactgactgcagaggaagaggttttgtatcagggaatcggtagagaattcataaatctgattgaaaacacaaacatgtcgaaggtttataagatgccggttcttatggcattttacaatcatggagacgtgctttgtgaagtatcacaggaacagctgttagaatgctggaaagattttttcggtacagggacaaactggaaggacttggaaacaggtattacatatgataagtattgtaaaatttccaataaagatcatgtgaaaaaaattcttcaaatgccagtacattttttgcaggaatcggggaaagggttctttgtaaaaagggatggatcggcacttgcacttagagaagatttgagagacacaatcacattatcttcatttgctgaacaaatgaaggatgttattgattatagaacaatggattattatcagagaaggtacagggagagaatggaagcaactgctctgtgagaagcttcgcatggaagaagcacaaccacctttaaaggtagaggatatagcgttcctttctggagtgtatgggtgtatgaatatcaagatactgagcggatatttaaggaggagtagcagggatgaaaccttttactcctctgttgtattcaatccgaattgtatgattagctatgtcctttaatcttcaatcaccgtaaagatttcttcgattggaacatcaaatacttttgcaatgttccatgctaaaactaatgatgggttatatttccccttttcaagatttccgatagtttctctacgaacacctaccaatttagctaaatcatcttgcttcatgtcatactttgcccggtattctttaatacggtttttaatcattatctgctccccttcgttctttcacttctaaaacaataagagcagcggtaaaggcaagaatagtaaccgcaaagctcagaccaaaagctattggaacagctttagtagcaccgtagatgtaagaacagataaacataaaaggaacgagggaaatcatttctgccataaatgcaaaggtggtagatttttggacattaagtcgaaaaaattcatctggtataacccagaagtagcgaagataataggcaaacccgaaaaaaccatataatccgtcattttcagttgtcaaccctaaaatcgctatcaatgccaaaagagataaaaagcctaggtagttaattttatgtttcataaaagtcctccttaatgcggtgtatttcgcactttatgttataaatataccacattgtttttctattgtcaatagactatgaaaaagcgaaaatattatgctgtattattatctgttaataattttgataaggaggataaggaagaagcctattgcgtgggagatttgaagataaccccaaagccgtgttgttgtactattttttcaacatgaccgatgttgagattgcggaagaaacaaaatcatccgggatagtcaatggacaggggaaaaaggaaagtggctataatttccggtataactgttttgtgttatggaatggggaaactttaagacttttaatttagtgtggaaaaagagccttgtttatagtttccatcgaggtgtataataggacaaaaggaggtttctgccatggagaacctgattgacaatcattttaacaaactgctctgcggcgatataaaaggcgctatttccgattattcgaagaaaattgtatgtattgcccatgtgaacggaaaatctgaaaccttgaccggtaaatctgccgctcacctgttatggaatctggccaaggtgctttcatttggcagtaaccaggatgttcaagtgcttatgaaccgcagcacgcaggtttatggtgtactcacactgaaaagtaaaagtttttccccattattgtcctatacctgcattatgaaaaatgggaaaatcgcttacatgaccatgtatgtacacaagcctgcatataatattctgccgcacacgctcacgcccatgcccaaaggaaagctggcgaaaaagttgttccataagcatgtgcttgccatgttaagcgtcaatgcggatgtcatcgtaaaggattatgcgccaaatgcagtggtcatcaccaatatggcagaggataccttcaacggcagacggcagattcacagtttctgcagccgtctgatgaaatccagctggcgcattatgaaaaagctgcgcattcatggttttcccaaaatcaaatggcggacaaagtctgctgctaacggccttttgctttttgtatgtgaagccgaagctttgggatcgatcatgaccgaaacttattgggtagagaacgggaaaatccagtttgaaacctccgtgtgcggcggcgaaatgctggagctcattcagacttctctctaaaaatgtagaaatttatcacagagggagcacatgggcataaaatatactccttgtctacggcagcattctgacaggggtggaaaattagaatttggaggaatcttatatggcaaatgcataccagataatagatgaaaagacatgggaaagagcaatgcactgtatggttttcagaaatagtgttgagccggcgttttgtgtgacatttgaggcggatatcactgattttaagagcatggtgaagaaacaaggaatttcgtttacgctggcaatggtatatgctgtttgtaaatgcgcaaatgagattgaagcgttccgttatcggtttgtggatggaaaaattgttttatttgacaggatcgatactgcatttacatatctgaacaaggacacggagctttttaaagtggtcaatgtacctatggtagatgatttgaaagaatattgtgaattagcctcaaaaataataaatgaacagaaggagtatttcaccgggccgttaggaaatgatgtatttcagtgttcccccatgccgtgggtgacatatacgcatatttctcatacaaattcagggaagaaagataatgcaacccctctttttgattggggaaagtattatgaaaaggatggaaaaatacggattcctatttctgtacaggcgcatcattcctttgtggacggtttgcatattggacagtttgttgaaaagttacagaattattttgaaaggagtagcattatggaagaattaaaatctattatggagaagtttgctgtatctgattgggatttaatagctgttccagcgcaacaatggttagacggaaatcctaataaggatgctttagtatcagcaatcaagcaggctgataaagaatgtggaagttgcgggtgtgaattagacccattgtataaaagagcattggaacttctttgagaatattgggaattttagcatctcaaattaaaattcaaaaaaaataattgaatacagatcatacataggcgtttgtcaataatggcaggcgctttttcttattcatttttgcgagccagtgacggaggctgtgggcggtgcagctgcattgaacctgatctcaaacgtggattgcaatggtggaatttcccttttaatcgttagaaattgcaaaattgtatttgcgtactgcagattacagtatgaaaaaaccttgtcgcatttatttactaccttttgtaatacttttgagggaaaagatataccaagatacgctgagatatagccagctatacacatttccacgaatgccggctactacggaatctatattcattcacacaatttttaccagttaattgttaatcataattgttgacaccatgtagttttaatggtagaatgtataaaactacatagaatcaaccaacggaggtacatcatggaacaacagatttcaatttctgaatcagagtggcgtgtgatgaaaattgtttggagcaattctccgcagacacttcccgaaatattggataaactaaagggaactgattggagtaaaacaacaattcaaacttaccttgcccgtctggtaaagaaaggtgcattgtctacgaagcgtcagggcaaaggatatttatactatccagcagtatcagaaagcgattgtcagcttgcagaaagccgtaattttttaagacgtgtgtatgacggttctttatccaaaatggttatgggatttgtaaaaaacggtaatctttcaaaggaagaattagacgaattaaaaaacttaattaccaggcaggagaaaacagatgcagatattaggtaacatctttaatgcagttatttttgtatctgctattggcagtatctttacgattatatcgctttttgtaaatcttgttctgcgttgcactttgccgttatggttctctttttgcggcatgatacttttttgtgttccgttcctatcgctggatgtatttttagtatcgccggaaatacaggattggataaacggttttcgtattgccagtttcttgtgggcgtgtggatgcggcgtttttcttgcgcatgataggatacgtcttatattggctaggagggccattaaaagttatcagatttgcaacaatgaacggttaaatagtatttattccaaatgtgcagcggcagccacactaaagaaagtacccatattgtattgcggaactttggataatcctatttgtgttaccggtgtaatttgcccggtgatcattatgaatgagacaatcatagagaagttgacagacaacgaattatcagccgtttttttccatgagttgacccatgtgaaacggaagcatgtccttttagagcgaatctatgattacgtttgtattctaaactggatgaatcccttttcgtggattgccaagaggaatttttctttgcattgtgaaacagattgcgattcccatactatgaaagtgctgcagggaaaggtcacagagacagagtatgcttctgccattatccggcttttggaatattcaacaatccggtctgcaaaaccaggaaatggaataggtgcacttgattttcttttaactaaacggagaattaaaagaattactgcaaaaacatcaaaaatcaaggacagaatgacagcaattatgttggctgtacttttgacactcatgcttgtactttccatgcggttcagcagagaatttttttatccatatccggcttatgataccggaatagagtatagtgcgggttataatagataacccgtattattaaaaaaaataaaactacaaatgtagttaagaggaggtttctatgaaagcaaatattgaaattagtcatgttacaaaaaagtattcaaatggtgttatggcacttgatgatattagcttttctgttggaagtggcgttttcgggctattggggcataacggcgcaggaaaaaccacacttatgaaagcattagttacggtattgtctccgtcagcaggtacaattcgtgtctgcggttttgattcccggaaacagggaagtgaggtcagagagcgaatgggatatttaccacaggaacttgctatgtacccctctctgtccgtgtttgattttgtaaactatatggcagaactgaaaggtatccatgacaaaaaggctgtgggtgaagtattggaacaggttgaaatgcaggaattttccaaacgtaaaataaagcagctttccggcggcatgaaacgcagggttgggattgcacaggcactgattggtaatccacagattcttgtggttgatgaaccgacagccggacttgacccggaagaacgggtacggtttcgggggttattatcacgatatgcaagggagggtcgtactgttctgctctctacacatattgtcgaagatgttcaccagctttgcggagaacttgccgtattgagaaaaggacggttgttttatgctggtacatctgctgcacttttggaacgggtaaagggaaaaataaaactcatacatttagaaaatgaaaatcagctcattgaactccaaaagaaatcggtagtcttgcagacgacttatgaaagccacggattgaccgcacgaattatggacgaaacttcttcttttccgggggctgctttagaggcggcaactttggaagatgcctatgtgtattgtatgggagggaaagcacatgcgtaaagtgattgcgattatccattatgaatataagatgcagtttaagagactggcaacgtggggcatacttcttgcggtaacagtatttaccttgttggataattacccctctgccgccaatttaacacgtttagaatttttaaatgacccagcttactttgtttatcggacaatgagccttaatggttttgttttgatgtttggcttgatgtttctgctggcagaacgttttcctttggataataaaacaggaatgaaacttttgcttatgtctcacgccctgcaaaaaaggcaatatatatttggaaagctgttggggggatttctgtatactttttcgatactatgtattttccttgttttaaacacggctatttattttgcagcattccctttcccgatttctttatttacctgtatcgttccgctggtaaaggtaatcgttgtttctgctttaccagtaagtttatttgtcagtctgtgttcggttgcgttaccgggaatgatagatatacggctattctatcttctttttgttatattctttggggtcaatgccgcttatgtaggctcagcaaatgcagcaccattttatatgattacttctggagatttaattcgtttaatatgggtaaatcctaaatggtcatttaatgatactggaagcattttagcaaatggggcttttcttatggggaacggtcttatctttggaagtctattatttttgaaacatagattttggaggtcagaatgataaagagagttgagagtgagataaaaattatagggataaacttttttatcatatcaggagctttaactgctgcacttattgtactttctgccattgccggggaactgctaaatttttacccgttcagttttgaagtgaccttccctttttttgtaacgatcgctgtgggggaatggggaaagacacgggcagacactaattttgatattattgccgcacaaagcagctcccttttccattgggtactgctgcgctatgtgatcacctttggaataaccagtgtatttgcagtttggggtatggtaatttcgtccgcttttcgatatgaattgcctttatgggaattgtttgttatttatttcccgccaacatttcttttgtcgtcattgtgcgcactgttagggatttattgtacacaggagcatgttgcaacactaatatgcggtatcgtatggctgatagtccttttaatacgcagcctgttaaggattccgggggtagaatacatctatttgtttattcgatatgccaacggtcaaaaccctgtttggttatggaataaaggcattctttctatagccgcattatttttatggagcatcatttatttgaagtgtaaaagaattgatactctttaaaaatcaacatcaaatggagtaataagaaagataaacagtgaggaagtaaaccaataggaacggcaagacttatttctattcggtttttagctttactaacggctgttatgttaccggtagtacttttgagctttgagtccttaatcccattaatgagctattcagcggatacgggtattgcaatcgatctgtttgcctttttaaaatatatgatatgatggctgttacctacggcaatgattgttacatcattgggaatgtttttcacaattttaacatcaacacccgtcgcaattttaatacaatttgtatggtggtttattgacggagctattacagggctatccggagatagcagtacctttacattgatgatacgccataatgtattagggggatctgaaataataagtcaggattttactcttatttgtttgaataggggtctgtatgctgtcatttctttgatactggtagattgtccattctaatatataacaagaaaagaggtggagaattcaattatatccatagggcatcccgtaatccatgccctgatgggcgagcagcagcaaagctgctgtacgttatcgggtatctatctgttttggggtattggactttttgccagcttgaaattattagtgaaagcagcgttctttacgtattccctgttatcgatggtgttgttaaaatgcagaaaggaattatgctgtgcagcgtaacgataggtttattcatgctttttacttcccaaataaagtatgattgtgttagaatataactaacacatcataagaagttgtaagaacgatggtttgatgaaaatatattcagatatggtggaaaatttttgtgcaagtgcatttataaaggggaagaggtaattcctgccggaagtacggtttaagaaatgcctgttgttctaaatatctgtaaagctgagaggaaatgatatgggattatttgataaatataaggaaccagtatttttgagggagtctgacgatgcggctgaagaaattgagctgttgcagtctctgctggaaaaggttccggaagatgtacaaaagcgaatacaacaagatatacgatgcttacaggcaggaaaagcaggagaagagcgtattgcatttgaacttaagaatagccatatgcctatgtttattttgcacaatctatatcttgtgcatggagagtacgcggcacagattgattatttgattattacccgtaagagatgttttgttctcgaatgcaagaatttgtatggtaatattgaagtgaattctgccggggattttattcgtaccatgaaatatggtaataggtatgtgaaagaggggatttactcaccaatcacacagaatcaacgtcatatggaagtgattaaggcagttcgaagggaagcaaaaggtaatattgttacaaagactctttttgaaaaattctttgaacagaactaccgaagtgtggttgtattggctaatccgcagacggttcttaattcacgatatgcaaaaaaagaagtgagggacaagattattcgtgctgatcaacttattacatacattaagaaagttaatagcgaaagtggtgcagaagacaatggcgaaaaatacatggaacaaactgccagatggtttttggagaaacatcaagagaatccaaagaactaccttgctaagtatgaaagcttaatcaatgctgaaaaatcagaagataaagccgaaaatataatagaagaaccgacaaaggtaattccagataatacagtggtcgcagaagaaaccaacttagacgatatggttgtatgtcccagatgtggcgcacatatggtgaaaagaaaagctgcaaaaggagcaaatgccggaaaggagttttatggttgttccagataccccaaatgcagagggatcgtgaatataaagtagagatctaattggaggagtgataaaacaatgataaaaatactattcgtctgccacggcaacatctgtacttctcagaacaaacagtagaaggatatacggtagaatttaaaatagcggcttagaggaggaaaataattatgatacgggtaatgttttgttgtcatgggaatatttgtcgctctactatgtgtgagagcgtttttacttatatggttaaagaaagagggttggaagatcagttttatattgactcgtgcgctaccagcactgaggaaattggaaaccctccacatagaggcactgttaaaaaattgcgtgaagtaaaaatacctttggtgcctcatagggcaaaacagataacatggaatgattactctaagtttgattatatcattggtatggatacatggaatatccgaaaccttaacagaatgttaaaaggggatcctggtggtaaggtgtataaattgttatcctttgtaggatcggagagagatattgcggatccgtggtatacaggaaattttgatgaaacatatgaggatattgtagaaggctgtgagggctttttagcttatctgaatgagaaaataaagtattaaatggatatacatattttataggttttgaaaaatatcatataggttttgtctaaaatcttaacgcctctttggttattactaagtaaataatcaaggaggctttttttatgattaacttggtcaaattggacaaagggaagtattttgaagacgctttcaaggtgtcctttaaatacgatccggttactgtagaccgaattaagcgtttagcttacaggagatatctcccgtatgatagggcgtgggaaatcccggcaagtgagctcatacatcttgtagatctgtttggggtggataatatcaatatcaatcctcagtatttaaagggaattgtgaagaaggaggcaggagccgccgcaaagactacagagagcgtaaaagagcggctaaaaggaattaagcctatcattgcctacccttttaaaacaaagccgtttccgcaccaaatagaggcttttaacatagggtatgagagtaaaaatttccttctggcagacgatcaggggcttggaaaaaccaaagaaagtattgatattgtagtggcccggaaagatgaaattggaaaatgcctgattgtatgcggagtaaattctgtaaagtataactggaaaaatgaaatcaaaactcattcagacgaaagctgtattgtagtggatggtaagaccgttgataaaagaatttctcagattgaggagtggctgtatggatctgcctattttgggattatcaatattgaaagtctcagaaataataaaatcatggacaggatctatatggagtgtaaggatggcattataggggccgtaatcgtggatgagatccacaaggctaaaaatgggatgtgcgctcagggaagatctgtgagaaatttacatagccggatcaggatagggctgtcaggtactcccatgaataaggctgaggatctctggaatatccttacatggcttggcgttgagcgaatgagtatttatcagtttagagcccggtattgtatcatgggaggatacggaggatataaggttgtagggcataaaaatttagatgaactcaatgaaaagctcaataaggttatgctgagaagaaaaaaagaggatgtgttggatcttccgccaaaaatctataaaactgagtttgttgagctgacacgaaaacaacagctcttgtataaagaaatcaatcaggggattgtggataatctggagagtattatggaaatccctaacccattgagttgtacaataaggcttagacagctcacaggaggcttatttacggacgataatcctaaactggatagagtaaaggatatgttggaggaaatcacggaaagcggctataaagcccttattttctctcagtgggagaaagttacctctgtgtataaagaagcccttaaagagtacaatccggcttatatagtgggtgatgtgaatgtagaagagaggcagagagaggtgaaccgttttcagcaggatcctacctgtaaagttgctataggaactataggagcaatgggaacggggctcactatgacagcggcaagctatgtattttttgtagataaaagatactgggatgctgaaaataaacaggctgaggacagagcccacagaataggtacggagcatactgtgaatatagtttctttagtggctaccaatacagtagatgaagggattgaggagcttctgagggataacagagagctttttgaccgtgtgattgagggcaagggtagccgtgtagatattaaggcaatcctatctaaaatcttgaaaatatgatcttttcatgttaagatgttagataggtttttgataatgaggtggaaagtgaggaacataagttgataaatgaggaggttgagttggtatgaaagtgatcggaggtgtgatccattataccgttactgaggttgctcagctctgtaatgtctctacccagagtgttaagctttggaataaagccagcgataaaaacgaaaaaaacggaggtgagcggctgataccgccccctcatgtagagcccaacgggtataaatactggagtgatgaggatacgaaaaaaataattgagtatgccgggaaatctcataaagagcggtatggaaatatgtctgagaagagaggggagtgatcctctctttttttttgagttggttgtgaggggtagtaaagtttctttactgggtagtaaaatttctttactacccgcaccctttataattatatatataattatatataaagtgtatttaaaagataaagagtagtgtaagagagaataggaaagggagggtgtgggagggaaaacctaaattttctcttagtggctctttattttttttcttaggctgtctaaattttatttgtgtttgtggttattactcagtataaagcaaataaaggaaggtcaaagatggtacaattaaattttttaaatgctcatgttaatgatgatggagacgggctgagagtgaatgggagaagtttggaacatttaatttctgtggcgttaggaactatcaaacgtgttccgaaaaagtacggttgggtgaaggaggaagataagttaaaaccattttcttctgatttgtgcaatgtatcagtgactattgatgatcgttcaggggatatgtcagaaacaatccgtttttcagatgacaatgaatcagtcgaggaggtgaatttttctgaatttttagggaggttagagaatgagcacactgaggaagctgagccggagaatgacgagaaataaaaatgagctccccatgaagaaggttgttgcccggaaattagggctgacaaataaagagctgaataaaaaatatttcaagaaatcaaaggaggacaagagtaatggatgatttgtttggaggaatgtttggggccagtagtataatgggatcttttgaagcaagagagagaacggctgacgctggcaggaggcgtagcggaatgagtgacatgagtaaggaaattacaatttccaaagaaaagtttatggaaaaagcttctaaggttgtagcagatggaaaatttgctaatgccggaattgaaaagaatcctaagcttggagttttgatgatgctcatggttacgccgattgtggcggagcttacggctgagttgtttgacaaggaggagaatgaagatggaaaaaaataaacctgtagtaagagtagcggctattgaggcagagctgggaatgagtgtacagaacaaagctgggatctggtgcaaacctacggtgagactgaatttgatggttgacggtggcacaactccggctcagagatccaaaatcattaaacaggcgtttgatgaagtgagtgagaatatcgaaaagctcttagaggagatgtagatatatgggaattgaggatagagctcattatgtagttgagcggtggatgatatcagagcttgggttaagcggaaacaggttagcactttacgctattatctttggattctcaatggcgggaaatcaggagtatacagccagtatcaattatttttgtgattggctgggagcttccagacctacagtgattggacttctgaaagatctggagagcaaggggctgattacaaagagtagtaaagaggtaaaaggcataatctacaatagttatcgtgccgttattcctcaggctcagagctcagaggatcctcaacctcagaaggtagaaaaacctgataaaaaagatggtaagatcccgtttactgaaattgtatcatacctcaatgaaagagttggatcctctttccggaccagttctgagactaccagaaatcatataagagctcggtggaatgaaggttttaggctggatgattttaagcttgttatagaggtgaaagtaaaagagtggaagtatgataagaagatggcaaattatctcaggcccaaaactttgtttggaacaaagttcgagagttatttacaacaggcgaaaagagaaaatgtgagtatttatatacagtcacaggaacaggggccggaggctatcccggcagtagatgagaatgggaaagaacttgtgtattgatgcaagaggagggtgagagctctcctctttttttttttgcttgtgggtgtctaaaaatattcttgttttctggttattaccttgtaagaaaggggtgagtgtggtgaggtgttacgctgagaaatactgtaagaaaaataaagctgagtgcggtgagtattgtgatgcttacaggcttttgagagcattataccggatgagcagattaccagaaaaatattgttacaatatcccccttgtgcctgaaaatggggatttgaaatcttttgaggctctgaatgattttatgaaatcggttgaggatcgtgttgcggcaggagaagggctgtatatctggagtgagaaaactggtaatggtaaaacctcatgggcctgtaagatcctgagctattatttccgcaaggtagcttttaggagcgggctggagaatgagggattatacatttaccttcctacgtttctggatgatctgagagcaagttacaatgaggagccggatcctggttttctggagttattggatatgctgaaaaattgtaggctcttgatcgtggatgatataggagcggaaaagtcctcagagtgggtgaatgagagattgctgagcattattaatacccggatgatgaaagggcttagtaccatttatacctcaaatatttctctggaagagttgggagcccggatgggggagcggattaaaagccgaattataggatctactacagaaattcatatcacggggaaagatcggagaggaggcggtagataatggctgtaaatggactgattgaggagagctttatatgtcggctgttagaaatcggctctatagatccattgaaggagcaagggcttacagaggatatgtttctcacctgtaaagatgaaatccggtttatacaaaaacattttgcagaatataagcagatgccggataagcttatctttctccagaaatttaaagattttcaaatgttagatgtatctgagagtattgagtatctgggagatcggattaaggagcaattctggtatacaaaaatggttcccataatccaaaaggccggagaactgcttagagaggacagcattaaaactgtagattttattaggcgtgagattgaaaatctacagaaagaaaatccggtaagcaggaataaggatggtacagacattatttccacagcaaaagacaggcttacctcatacttgaaaaggtgtgagttaaagggacttatgggaataccaacaggaatatctcagcttgacgatcttacaaacggatggttatggggtgaggagcttgtaatagtgaccggaagaacaaatgtagggaaaagctggatagctgagttttttggtactatggcatgggaagcaggatataaagtcttacaatactccggggagatgagtgtggagatggtaggtttccggtttgatacgcttcataagcattttagtaatatgggactcctgaacggtgctggagtattaggaaataaggctgggacagacggggggaagtatctgcagaaagattatgaggattatatcagccagctttcccagaagagcggttatatcattgtaaccccggatgattttggagggcgtaagcctacagtgggtgagttggaaacactggcaaagaaaatcgaggcagatatggtagtgatagatcagttgtctcttatgagcgatcagcggcgggcagatactccccgtattgcctacaataatatttccgaggatgcctttttgatgagtaagaggctggggaaacctgtaataatgctggctcaggcgaatcgtgagagtgtgaaaaataaaaagaagggacaggccccggagttacatgatctggcagagagcgacggtgtagcccagaacgctaccagagtaatagcactatctgttatagacggcattttaaaactggctatgaagaaaaatcgttatgggatcaataacaaggatgtgctggtaatgtgggatattaacgccggatatataaagccacttctggacgggaagaaggacggagagagcggtggtgatgaggctgaacagtatggattttagggagggagtgatggtatgacacatagcaaacaatattatatgtattatacatttcgtggaaaatccttattattctgggccgaacagtggtttaagatgagtaatgatgctttttataaaatgtatggattcaattttaatcctcatgattttcccagtttatatgaaatagccagaaaagaagtttatgggatgtaaaaaaaaaatgaaaatctttaaaatgcttgtctaaatatcgcctcctcttgtggttataactggatataaccaaaaaggaggcggttttaaattgattagactgaacagcaaaactgtagctgagtttatcggtaaaaggcatgacaatcttatgagagctgtgagatctgacattgagaaactggatgatccagagcgatattacaaagagagctcctacaaagatggtaagggacagacaagggcctgttatgaaatctctattgagggctgtgagcggttggctaaaagactcacagagccggagaaagaagagtttatgaacaagtgccgggaaagtaccggggaacctgtaaaaaagccggagaaagaatatacaacaaaagaagttgctaatattctggggtgctcagagagaacggtacgccgcaggatccagtctggagagctgaaatctgagaagcggaagtttgaacaggtgcttatttctgaaagaacagtgataacttccggggcgttggaggagtttatagcggcacagaaagaggagggcaaggatgtttaagtggaagttgagagcttgcagagtacaggccgggtataaacagagatcggcggctaaggagcttggtatctctgaggctactctgatagcctatgaaaacgggaaggtttctccaaatatggaaacagggcagaagatgagtgagctgtacggtattcctatggatctcatggactttaccagagcggggaatagtacatattaacaatggtatttttgaatatggaggatctgtttaatgacagcggcaaaaaaaaacggagataagtaatgaagggctggaaaatatccggtttggagtagtggagcaagcggtaagggattataaaaatcttttgagcggtaagcagaagcccacagcagattgcaatattccagagttagaaaggtttttccggggagattggtatagggctctttgtgattataacggagaaagccttatgagagaaataagaaagcaggtagaggaggaaaaaaaatgagtgagtgctttaaggttgatgagctgatggaaagtattagaaatctttcagatgaaaatgagaggctgagggaagaaattgcggatcttaaaagaaatcttgaacagaaaaccgcatgtgctcaggaaaaagataagagtatggaaagactgtggagggaaaatcagtctttgctatgtcagcttgaagatgtgcagaaaaagttaagtgagatgacttgtgtaaatacacatttgcggcaaaagttgagggagaaagaaaatctgagtgtaaaagatattatgaatgaactttccaaaaatggagctcagagcgttcttatcggttttaaataaagaggggcggctatggcaattagaaatcttttacatatggacaagctggaggagtttgaggaatttctgagggctgagggatataagatcctccctctcagcaaaaacccgtatgaagcactcagagcaaaaaatggaagagataccataatcatttaccggagatcagacgcaaaagaacatctttcaattatggataaagactttgagttggtagagaagtttttgcataggagtagggatgctcctgaaccggatccgtggggatctggagagggtgctgggattgatacagagttaccgtgggactgaatagaaaaaggagccttgcgacccccttttccggtagcttatttgttcatcctgtcagctacaattttcaggatttccttatcctcatccgataacttgtaggaagatattaagagttggtaaagtattggatcatttttgatagaaatgattagctcttgtaactctttttcttcatccgtctgtaaggcagtaaattgaaagaattggcttataggagcttgtaagtagtcagctaatagttgtaaacgctccatatccggtaaatgtctacccgtattccatgcggaaatggtagtagtgggaatattcaaagcctcagcaatatccttattggacttgcctaacaaggatttgtagtatcccattgccttagaaaagttatggtgtagaggagatttcggatccatttggttcacctcctctcattggggataataatattatacagctaaacaagataaaagtaaagaaaaactgaataaaaacattgttaaacaatatttttatattgacaaacttgtttaacaagattattatgaggatggaggtgttataatgggcagtttttggctcattacattttttatacccagaagaacttgtttaacaagatttgcaaaaaggaggatgcaggaatggaactgaaagagctttaccagatgtacaaggtaaaaaaattgcaggcggaacaggcggtaaaagaggaggagaaatataagaaattcctcaaagatgccatgttgaaagcgggggaaaaggatcacacggatgatgagggataccgctttgagaggatcgtacagaccagaaagagcatgaatgaggagatggtactggagagcctgaaagagaaagggctgacgggctgtatcaacacagttgaggcagtagatgaggaggcggtgcttgcggcggttgaggctggtgagtatccggtggaagagctccagaaagcgtacacagagaaagaggttgtaatgctgaaaatgactgctcccggcaaacagaagaagaaatgataactatctggaatacgccgatagccgccagtgtggatcagatcctaaaggatctcaaaagagagctgtatgcagagagattactgacagagcaaaacaataccggatctgatgtgatggtgacttgtccattccataagggaggccacgaaagaaagccctcttgtggtgtgagtctcagagaaaagaaaacgccggaaaagacttatgaggccgggacagtgcattgctacacctgtggttatacagcggattttccaacgtttttaaaagatttgttagggctggatagtgctatggacggctttaagtggctggtagggcgttacaactattccaccaatgacagagaagagatttcttttgatttctacagaggggcggaggaaaaggcggcggcaatggaggaggcacaagttgaggaatatcacagaaacctcatggagagcgatagggcaaaacagtacctccgggggagggagattatcccggatgtgatggagctgtttagccttggttacgatccggcagatgatgtggtgctattcccggtgtactcccggagtggagaggtgctgtttttcaagagccgttctctggtgggaaagaggtttttcaatgcaaaggatgttgataaaacttccgctgtttatgggctgtatcagaccttacaggcggggatcccggcagatacagagatatggctggtagagagtgagattgatgctctcagccttgtatcaagggggatcttagcgtgggcgttcatgggatccgacatatcggataagcacattaaagaaatgcttaaaactccttacaggaggtttgtgatagccacggataacgataacgctggaagaaagggagcccggatgataaaggacaagctgatcccatatggtttccgcttttataaccttcggtggctcacagaaaagaaagatatcaatgaacttattcaaagctacggagatgagtttatggattatctccagaaatattaaaggagaaaacaggatgaaaacaggattgtatacaggattaagtgatgaaaaattagttgagatttataaagagacagaagatgagagagcttttgagcagttgatgaaaaacacagagcaaatgagatattccattgcagagcgttacttgaatatccctgatagtgaggttgaagatcttatgagtgagggagctatggagatgctggtagccgtaaagaattatgatagtgctcagtacaaagcttcttttaagtcttttctgtacacggctatttcccgaaaatataagaatatgttcagggtggctacaagtaaaaagagagatgctcatggaatggttttgagctatgagcagatcaatggaaactgtgattgtgacggggaagagaacacattgggaaatatagctttctctgtagagtgtgaagattacagtatgacggagattgcaatggtggtaggagccttagagctctcagaacgggaaagagtagttgtaaatcttttgatgggcggtatggataagccggacattgcgagaacgttaggtgtaaagacaccctcagtacataaatacattgagagaattggtaaaaagatgattttatcaggtgtctttgcctaaaaaccctcttctttctggttattactaagtatatcagagaggaggggagctaagtgagaaagcgtgtaaatgtgttactggcattgattaaaggtaaggcaatcgtaatagctcaaaacccgattgtggagaatgaggctgatgtgctggtagggaagaatttaacaaaacgatatgcggtgaatagtctggtaagcactttaaaggctatagcactgtgaaaatataattttcgataacaggagggaaacaggaactatgggaaagtcattaggagagttacttaacaaatacgaaagtcagggattttcaaaaacaggatggttttcattgaaagatgatggagacagcacaacagttcgtatgttgcataagggacagattggaacagagccggacggacagcctaagtatgatctggatgtgttggaagtacataagatggatgtggatggatcgggccgggacaggacaatcctttgcaaaggtgagggatgtgagatctgtagagccgggaataagcctcagctcagaatgtttctccagatgattaatctggacgagaaagacaaagacaaacagctccagctctgggaaagaggtatcacagatattaagcagattttgggactgattgaggagtacggagatctcaatgcaagggatatcaaaatcaagagatccggtgcaaaagggagtctgaaaactacatatcagtatttcccgaaagataagagcgaaagggatttgccggagaaacaaaatcttattggctccctcattctggatcttacgcctgaggagcagattaaggcgattgagggcagactggagacaaagaaagcaaattcaaacggcggcggtaacggagcgggggacagttccagagtattctaaataaaccggatggcaggagggagtaagaaacagttactcccttcttttcgataataggagggaaacaggatgagagatggtgtaaagctggatttagaaagagagtccgtgacattagatgatattagtgggcggcttgctcacaaaaaggtatgtaatattactctgaaaaggaataagaataagctggaggcggctctgaatgtaataaatgagctggtgaaatcagggaggctccatgctgagggagaagtggaaacaatccatactcctgagaggcttagagaatatatggagcattgccggaaaaatggaatttatgtgttagatgtggagactacgggactggatattttcaatgatattctggtgggtatctgtttatacacgccgggggaaacatcagtatatgttccatttaatcatacagatctccagaatgtgagagtgtcggggcaaatgactgaggaggagtgccgggaggttatgatcccttatttagaggatcctgagattaagtgtattaaccagaatattaagtttgataataagatgcttctgtggaattggaaatcccggattgcaaatatttactgggatactatgatagcgggatttatcttaaatgaaaatgagccacatggattaaagcctctttataacaagtatatcttgcacggacaaggctctaatgaggattttggggacttgtttgaggatgtgcctttcaattatgtgcctattgacattgcaacggtctatggggcaaatgacggctttaaaacgtatgctctacagcaatttcaggctcagtttattaaccgggaacacaagagagaggactttaggaaaatggctcatgtgttctttgacattgagatgccgctgatagatgtgtgtacggatatggagcttaggggagtggaaattcgggaagattttgcaaaagagctttctgaggattttaaaaaagagttggttgaggttgaggctaagtgtgatgcgtatgtagagaagtataaaaattatattttggatcataacactcttatgcgtcttactaaaggcacttgtaaaatcaactataacagccctcagcaggtagcggccctgttttacgatatctttaagctgaggagcgtaagccggaaagagcctcgtggaacaggtgataaaattattcagaaacacctttctacagcgaaaaagaaaggcacaaaaaaagctcaggagtttattgagtttttacagaattatcagcgttataaagaaatcaataaactgttagggacttatgtagataagatcccggcagtaaaggaacctaagacaaatgctgtacatactacttttaatcagtatggagcggtaacgggaagattttcaagttcagatactatcagtaaaattaatctccagaatattcccagtaaagagaagaggatcagaaagatctttaaagccagagagggctataagctggtaggaggagatttttcacagattgagccccgtgtgttggcgtattgttcaggggatgaggctatgcaggatgcctataagcatgggagagatctgtatgcaatcatgggatcaaaagtgtataatcttccttatgaggagtgtagggaattttatcctgatggtatagtaaatgcagagggtaagcacagaagaactactatgaaaagtgtattgcttggtatcatgtatgagcgtggagctacagccataggggagcagttcgataaaagtgcagagtgggctcaaaagctcattgatgatttttataagagttttccgaaaattcagcagtatcgcctttgggtagagcactttgcggaaacctatggttatgtaactacagtatgcggcagaaagagaagattgccggatatgcagttagaggacaaggataattacaaatatcaggaggctcatagacaaagcctcaatagcattattcagggatccagtgctgacattatgaaacttgctatgattgcgatttatagggatcccagatataaagagctggattgtcatatgattattactgtgcatgatgagcttattatggaggtgccggaggagaatgtgaaagccggggcggagcttctggtaagtaccatgaagagagtaggacatagcctcattgatcttcctatgagtgtggatgctgaggtaaatgattactggtacggagaaaatctggctgaaagatatggggtgtaagagaatgtgatgagagtaataatggatattgatgagaaggatgcggatgttttgagcataacggcaatgggggtacatttaggttttactggatctggagatgcaagatcagaaactcatgtaacaggatcggtacttaaattgtcaggggatgagatccgtgtaaaagtagataataccggaaaattcttgtttgtagaggatctgtaaaaggatcctctttttcttagcgtgtctaaaattgccctcttttctggttattactccttagaaagataaaggaggatacaggaaaaatgggcttatcaagtttgatgaaagtagcacaagggaaaaatgccgccgccgtatcttttgaggatgcgtttttgaaagagtatgaggaggccgtaaaacggcaagaggagagagaacgtcagccagtgccaaaagattactttaggccgtcctcaatgtatggctgtgatcggatgcttttctttatgcgggtgcattgtagaggtgccggagtaaaagaggatgtcgatactaaccttgtggaaatatgcaatagcggaacagatcgacatttaaggatccaacatttagtagaggatatggagggagtaacctgtttagatctggaagagatcgtaaaagaggctcaacagaaagggattaatactgtgtttgtaggttggaatgaggatcatacagaggcccggtgtaagaatgatgatctgagtatttattttcagccggatggtgttatcaatttcatgggtaaagatgtgatactggaaataaagacagagagtacatatcagcactcaaaaagatttgagcctaagctggatcataagtatcaggctacttgttatgggatggggctgggaattgattatatacttttcttttatgaggatcgtaatttttgtggcaaaaagctatatctctggaaaattacagatgagatgaaagaggaagtaattacaaagatttccagaataaacagagctatcaatgatagtacccctccggcaaaagatgagaacaagtgcgcttactgcgattataagcatgagtgtaagctggtagatgaaggaaagtggaaagatcccagatatgccagtgaggagggtttagaggatactgaggaggttaaggaggagcttttctgatggcagataaaaagaatatggggaaagtgtttgagaaggaatttaaagacagtgtaccccctgagtgctatttggaaaggtataaggatgatacaagtgggttttatggggtaagcaatccggcagatttccggttatacatttatccttctttaatccttctggagttgaaaagccataaagggaaaagtctccccttagagaagattagagataatcaattaaaggggatgctcagggccgtagagcattatggagtgtatggaggatttttggtaaatttccgggatttagaggaaacgtattttctctctgtagagctggtggaaaaatttgtgctggcaggagagaggaaaagtattccggtaaattattttcgggaaaatggacttttgatcccgcagaagaaaaaacgtgtactgtattcctatgatttgagagagtggcttgggaggtattctgatggagagatgtagaggttattgtgggttaacgtgtgttgatggtagttgtcctaatgctcttgctgaggagtattctgagtatgggtatgaacattgtacctgtgaagagtgtggatattataagggatgtgaagattgtgctttagctggtacacagtattgtgataagaagggggcaagtagtgatgatgagtagatcggagatagataatctggtagctgagcatggagttactttgtgggctacagtgagaatgggtggtgataaggtagaatatcagtacatgagtaatctgtatgggattaatttgtgggtggatcctgaaacgctggagtttcgtatggggtggattattccacattctgtattgagggttgaatgtcctccatgttcaccaattacaaatgagccgtactttgtaaatatgctcaaaaagattaacagagttgttaggatcctgagcagagaggagccttttggtgagtgaggggggtgagttagttggttaattctgaaagaatgaaaaagctgatacaggaagtgagggaggaaagctctgtagcagtcaagttttcaaatgagcttcttgcagaatacacggaagatctggatactgctatccgggagatagaggtaatcatggatagcataggggagagctctatagaagatattccaaatagtcagattgagtattattgtgtaaagatcccggctttgatgtatcgggcaggagtaaagctggaggagctgggaatgatggcggatatcagtgcaaaccagaagaggcaggaatacaatgaggctatgttgaaagtctccgggacagtacaggagaaaagggcaagggcagaacagctcatagaggataaggctctggtagaggtgatttacaaacgtacatataacagcctgagaggaaagctggatatggctgagaaaatgtacagtggtttaaaaaaggctcttacaaagaggatctctgagaatgatctggatagattttcaaaggatggatattcacggagaagtgaggaggacgaggagtaatggattttatggacaaagccgccgcttttctggaagctgtagagaaagccgggataagctttagtaatttggatggagatacagcggtggtatgtaatgattgtgtagccgtagtgggtaagcatggagatgaagtgggggtgaattttgttaatatggttgagaagttagattttacagccggatttacggctgaggacgtagaggagtttcagtttatggatgaactgatgggaggtttggaagatgccggggattgatgagctggttgccagcatgaataagaagtataaaacaaatattgtgcggaaagcttcagatctgaaaagcattgagtttatcccgtatacatcccccaaaatgaattatcttaccagaggtggagtacctgtagggcgtatggtagagtttgtagggctcccacagagcggaaaaaccacaacggcgttagatgtattggcaaattatcaaaagctcaatcctgaccgttacagcgtgtatatggatgcagagaacgctatggataaggaatgggggattacgctgggcgtaaactgggacaaggttattttgatccagccagagagcgagtatggggaacagcttttagacatgcttctggattatatcagatctggagaaatcggtatggtggtgttagacagtgctccggtgatccagccgaaaactacttgtgataatgctctggaagataagagctatgggggtaacagtgctcttatgaaagctttttgtgataaggtaatacctatttgtaaaaagcaggaatgtacttttattatgataaaccagattagagaaaatattggaaatatgtataagccgtataagatcccatgtggtacagctcttactcatgcttgtagtgaaatcctttggtttacaaagggatctcttctggatccagatggtaaagaagtgagtggatcttatgctaaccccataggcaatataataaatgtgaaggtggaaaagaataaggttacaaagaatgatcggaggttggacagctacactttgaattatagccgggggatagatgatggtgcagatactattgatctgggtatcaagctggggatcatagtgcaaactggggcatggtttaaggttccggtatctgatggttcagaaaagaagttacagggaagaaacggggtaatagagtatttctataatgatcttgaagagtttgaggtgttgaaaaataaagtgtatgaggcggcaaaataagggagtgaggagtgtaacagctcctcattttattttagaaattttcaaaaacctatataatatctattgacatattttcgaaaaggtatataatatctagtgtaaggaaaatccttacacaacagaaaataaattataaaccgaggagggcaaaagatatgaagtatagaaatgacaatgataacagatatagagtaaactttatgagatctacagaggagcttatagatgcacttacagtcaaagcgtttatctcatacttagaggaaaatgcagagttggaagatgatgcagatgttgagtatatagatggaaagtgtgttatctgtaaagtatatgatctgagagagactgacagcagtttacacaaagaatttttagtaattgaggatggaagagttttctactggttatctcttttaaagaaaattgagttagtagatagagaataggcggcgcagataaagaaagaagataatcaaaaggctaaaatggttattgtattttctcagattatgaaaggttttacaactaaagaagaggttgcagaagagattgaggaattaatagagagtgagacttgcccttacaaaactttaaaagaaaacattgaaaactgggcaagatgggatttgttaaatgaggatgcaattatcattttttccagacttgaagagtatcaaaggtatttataaaaaagagagatgtaggatcctaagggatcccagaaaaggaggcataggtagtatgacagaagcagaaagagaagtttatctattgctttatatggccggaagatcagaggaggctattgcgtacaaaaagagagtggaaggacaggaaagctttgagatgaaaaattgttatgaagtgaggttcgatactaaaaagggatttcctaaaagttgggttattcatgttgaggcatctacagcaaaggaagctaaagagatggtttctgagatgtggagtagggatagtagaataggggggatgcacaggttccatgtgcaggttaggaagttaaaggataccgaggaatttaagtatcattattttgttatttgtggaaagtgagggattaagaaatgtttaatgtgtatcttaaaagtatgggtggagtaagaaagccgttttgttcatttgagacagaggctgaggctgaggatttctgtagagagtttggctggtgctgggaagatgagaatgggtttgtgtgggatatcagctatgaggaaaaggaggaaaaaaagagatgttggaaaagaagatcagacggtataagctcatggatattcacagagaacttgtgagaaacggggagtgtgaggcggtaagggtaacaaagccctttcctgtatatcctttcaaaacaaaggatatagagtagagtgcttagtatgagtggtggttgacaagttttgctggtttttaatgtgaaaaccttaaaacgggtaggagttgctggaggtgtccggctgatccgtgcaattatgaaacaatggatccggcatagtgccagaaaggaaggtggtagcagaaatttatctgggggttatctctgagccataaagaggctactaagcattttattcattaagtataagggaggctgtaggcatgattaagaaatcagcggcaaaagggaaacagtttgtattgacggctgaggggtataagcgtactccagatagagtaaagccggaaagggcagttgggaaactaataaagggctatgagcactctgtttatcaaagctggatagataagggggatgtggaggaggatctttcaggggtggggattgcccttgagcattgtcaggggtgtgaggtgggattatataactgtgtcataaatgctatggattgtgatcggttgagagctattttaaaggaggtttaggcggtatgaggataggagatagggtagagctgtataagggcttatttaaggattgtagagctgtggagcctgtcagagaattaatggagagcacaagttggattactggtgatgatattgaaaagctggaggcgattagggagcttaatacaaagctctcagatctgtatcaagtatctattccagtgataacagtatgggtacgggataacaattatgtacaagctacaggagaaatatatttgacggatccagagctggaaccttttttgcacttgtttagacaccatttacagaatgtggaaagaaagtatgagaggcgtgggttgacggcggaagggagcgttgatccagaagtctggaagatcccatataaagataccgtacataagatgtatggggaagatgatgcttgtgcatgggctaaatttgttattgagacagctacagaacagtgatataatgaggagtatattgagggatatacaagggaggaaatggtatgtttaagaaaggctcggcaatattactttctgtagttttatgtgttccatttggaaatgcggtaatggctgaggataattctgccagaatagaagaaattcaggcccagatagcagaattagaggcagagttgcgtgagttgaagggtgaaaccggaatagaagaaggagacgtagtgtatcaggatgaggaggttattataacttatgatgggataggtgagaaattaggaggttatgaaattaagctaatagtggagaatatttcagatcagactgcgactgtgcaggtccgtgaaacttctatcaatgggtttatggtagatactgtgtgttcaataaaggtagctccggggaaaaaggctaaacaaggtataggtattgtaggagaagccgctgaggataatccgatggatgaagtagaaagtgttgaaacaaagttctgtgtatacagagggagcggttttacggactcttatactactgataatatcataataaaataaacagattagaaaatgctgaggatcttttacaggatcctctttttttttgtctaaaaatcctttctttttgtggttattactgagtaaagaaaggagttgagttgattgagggctcatatgagtgacggtcatttatatgctggagataaagtccgtaaatggcaaagcaaaaagtatttttttagtgtcagaaaatgtgttgaatgagaaggtatttttaaatttgtatgatgctgagtgttattgccagaaatacgggtataacccggacgagtgtattaagtctggtgatcctgaggtttggagacattgtagagaaatagcaatgttaaaagcaagggtgttgaaagaacaggcggaaattcttcacggaatgttacaggagcagtacaaaaagacagaacgccttgcagagttgcgggatagagatgaggcaatgaataaacgtaactttgaaagggagatggatcaggagaatgtgattaaaagtatcagtaaaggctctggactatatgcggcctataaaaatgtacgggaaagagcgtggtattatgagcagattgttatatacgcaaaaaaaagccatgagggagaggagaaaagcggtgacagatggaagatttggagatattggatgtttaccagtgtcggggaatgacgggaaaacagtttggatttttaagccggaagatctccgggaagtggtgccggatgatgtgtataagtgcattgaggcatttatacaggaacagaatgaaggatcatgtattgagtatgagagaattaatgagggatccatagatttttacaggggtatgtgtgtagataccatgaatgagcttaggcctgtattggatgaggtcagatatggtaagagattgaacaggaaaaagctggagaaacagttagaaggtatctggagcaatttagataaaaatttgtaggaggatggaaaaaggatgaaagggagaataattgtaacaaagaaatgtaaccgaaagtgtaagggctgttgtaatgattatttagggctggtagataaagtcgattttgatagcctttttcagtatgatgaaatcatcattaccgggggagagcctatgatgatttcagagcgtgtagtggagatgttccacagactgaaatttagtggctatcaggggaaaatttggctgtatacagcaagtagccggaggcttaatagatactgggccgtagaaatgttgattgatgaagtagatggcattacatacacgcttcattacagctcaaaagaggataaactgaaaaaggatcttacagatttgcggcggctggatcagtatcttgcggatcacgcatggagccgagagggaaagtctgacaggctgtatattgatagccggatttataatcaggagtacgttgatagccttagatataagtgggcggcggtgaagtcgttggaatggaaagaaaatggagattgtccgttgccggagggggaagagctggtattttatgatttggaggctgaggggtaaatgagtgaatatgtaaaagagttgccaggatttaggtttaagtgcggagatatagtttatgttcttatacagcgtaggattacaaaagacgaggtgacttggaaatacgatcatatagggcctatgaaagaggtatttcagataaccgtagggtatgagtggacaattgtagaaaagactttttgctgggggcttttagattcgtttcctatagatcatatttgtgctactcgtgcatcggcagaatttaaaagaatgagattggaaaggataaaccgaaatgaggtatcataatatcgcaacagatgatatgctgaatggggacgggctgagggtagtcttatgggtggctggatgttcccatcattgtggaggttgtcaaaatcctatcacatgggatccggctggagggttgctatttgatacctctgcattttgggaactgtttgagaagttggagccggattacgtcagtgggattactttttcaggaggtgatcccctctatcccagaaatgctgaggaagtgttgaagttggcaaaggcggtaaaagagggatttccgggtaaaactgtgtggatctataccgggtatctttggaaagaggttaaggctcttccggggctggagtatgtggatgtactggtggatggagaatatatagaggctttgagggagcctacttatcactgggctggctcaactaatcagagggtgattgatgtgcagaagtctctcaaagagggaggagtgattttgtggggcgaaaagtaacattaacggagataaagaaagctcttgcagagaagcttctgagggtgatggagaatcaccgggtagtgagttattggtggagggatcgggaacaggttgtagaggctttagataaggctctaagcggtggctatcctcatgagctgaatgatgcgatatatcaattaaaacgggctgtagattggctggacggattgagaggtgtacaggatgagcaatagggcggagaggcgtagggcagagagagagcagagaaaagctcaggctacatatacctttaccaaagggaagttagaggagtatgtaaacagcagatgtaaggaatattttgaccgggaaagaagccggataaagcaggaggctacagacgatgcagtaacaacggctatgacgttgcttttcgttctgccgtgtgaggtgcttatggatcatttttgggtgaaatcctatgctaagcagatcccgaaatttacaaagcttctgttagattactatagccgctggcagaataatgagcttgatatggtagttatgaaagcggatctctgggagtatggcggtattcggtttgaggagagtgatccgactgttgaggagggtaaaaagtgaaaagaggagaatattataggggaagagatgggagaaagtacgggatctggaatgaggtaaagaattgttatcagtttgggatagctgaggatagtccaatgttggcggaggcaagattattttacatgattggtgatgatgcccgtaaatgtagatttactgcaaaaatcttaccaatagaggaggtaaacagtgaaaaataggggaagtaccagatacaagagcgatcagcaggagacgagaatagcctcccgctttactgatgggagaaaggtaatgggatcaggctctacaccgtttctgaaaggggatgttgtaacgccggatttgtttatagaggcaaagactaaggttcaggcgagtaaatctattactgttaaaaaagagtggctggaaaaagcacgggagcaagcttatagcatgagaaagcgtgattatgctcttgctatctcttttggggacgggaaagattattatgtaatagaggatcattttatggaggagatgtacagaagtagggcggctttggaagcactgatagaggttttgggcggcttggaggataatttggtagatgatttggatgagcttacagtgaacggtatacggcggctgataaggagatatttagtgtgattaggggaggggggattatgactttaagggattttataaatacttttgtgcttcctaattcaatggtacgtctatggaaactattaagaacgcagtattgcgggaagcatatgaaacaacataattgaaagagatatgaacggaaaaggcaaaaaaacttgtcttttctgttttttttttgtctaaaaacagccctcatatgtggttattactgtgtatggaggtgatagcaggtggatcaaaatgtgaagttttttaaggatgctgaggagatagaagagtttctgaaaacttaccataatgtagaaaataattccgtaaagagtggggagatatgtgctctatttcatgtacataaagagaagcttagatctattgttaattatttgagaagtgcggggatcccggtatgtagctccagtaaaggttattggtattccgataggccggaggatatagataaaactctttctcatttagaaggaagagtgagggggataaatagagctattaagggattaaggaagatacaggacaaaaaaaaacagggagagtaagaaggtttctgtttttgtggaggggtaagagaggtgtttaaggtacttgagttggttaaatatatgatgccgttggatgctgattacagttatggagtaatactggaactaaaaaagggaaaggctgtgattttgctgagatcttatcctcatggactaatagtagaggttccataccgatatattgagcatattagaaaggcggtgatgaggggtgggagcggtaaaagtaaaaaccttgaatgataggcttttacagacaaattacgcagagccagaggagataaaagctataatatcaaactggagtatgatggagaagttggcagagagtggagatacagtagcctcagccgttttagtagatttgcaaagagcaataggggtaaatatatcggcgtttgagaagaataaaaaaataggatttgatgtgagccggataaataagggaatattgacggaggctcagtttatttctttggtgtatgttttgggactgggatatagacaagatgagatagcgtttgttttaggatgtaaaaagcagacggtaaatgtacatattgcaagggcgttgaacagagtatgtaaatttctggagggcaaggatgagaagaataataaaaaggggagaggatgaggccgataagtggcttaggatccatgatccatattatacagacatgagccggggaaaatcaaataaaatctgtaatccttatcttactcctgatcaggaagttgcaagggcaagaaaggaaatacctataagccagttaggagatgctgacttagattatttgagcttaaataagcgttgagcggctgactttgtgtgaggtatttacacatatattatgaaagtaaattgcaatgttatgtaatgatatatgaagaaaaaggaggaaaagttgctatgaatgtgaaggaaaaagttgtactgtatacggatcctcataatctgattccgtatgagaaaaatcccagaaataatactctggctattaatgaggtggttaaaagtattgaggagtatggttttactaatcctattctggtaaatgaacaaatggtaatactggcaggccatacccggagagaggcaagcattttagctgagttggaaagtgtgccgtatattattcttgatgatttgacacctgaacaggaaaaggcgtacaggctggcagataataagctggctgaactttcattgtgggatgaggatttgctgaaagaggagctggaggatcttctggagaaagactatgatctgtctcttacaggatttacagatgtagatctgactgggatttttaaagatgtggaggagccgggggaaaaagaggagccgctgaaagaggagaaaactactcttcctatgctgaggtttggaagtaacagtgtaaggattactcaggatgagcttgtggtgctcagtaatcggtataatgagtatgttgaggcagagccaggagagggatttgtaacgtggctgttaaagagaggtatttagatcatattcctccgggatggataaagataaagggtgccatgacagcccctaaaggatataactggtatagcaacggaaaatccagatttgggggaattatgagtgtgctctgataaaggatggtgaaaagattgatagagggaagaagtaagcttatttttggtacaggggatattatgattactcctgtagtgtataaggccgataaaaattctgaaaagccggattatggtatgtgtgcctttgaaaaccatgaaatcaggaagataggaagttttcaggaaaataatccgggatataaattttctcaatcagatgtactaatggtgtttaataagctggagagcttggatgcggtggtagaaaggctccagcttttaagagagatgatgtggggagaaagtgaggatcttctggaaatgatagagccggagagtgagggggatttcaaagtatgattgaggagaatatgtgttccgaggaagagagtgagctgtagaaatacagctcatttttcatttcatacatatatgaaattccatgaaaagagggcaaggctggggaagagaaaaacagcgtttccggggaaaaggaaaagtatagaaaatactactaaataatcctaataataaagaaaccgatataaaggataacactataggaaatataaagaatatgagtaacatgagcttttgtcttgagaggcaataaaggaaatatgaattttagacagaaaattgaaaacctttaaatggattttatcaggattaagagattttaagaaaaatccccttacttaaaacagagagagagaaaggggagcggacgggaggttttggatatcgtggcagacgaaaaagggcaggatacgggaaaagcggctgatgttgtctctataaagggtaaaaaagagacagaagctcagaaacaggcgtttgatctgtattatagcatgggagcaaagagatctctggaggctgtagcaagtgcctgtaataaaagtacccgtacaatcggggaatggagccgccaatttaagtggaaagaccgtatagtgcagaaagaaattgaggaaacggctgaaaatggatctacagctaatgcagtgatagatgcaaaggcagagtataggcagattatcagggctttagtagcaacgtttgtaaaggattataaacagggaaagatcaagattaagaatatacaggactttgaacggctggttaaattggatttattgcttttgggagatcctacggagcggatccagcaggaaaataagcaaaatgttgagttgactgaggaggatagaaaggcgatttttgccgttgctgatagtatcaaagcggaaatgaaagcacttaggagctaatccattgtgcatttttacttttatgtgttgaaaaatctcgtgggtaatacaagcgactcatgtaaacttgcacaacgtttcttctgcctgtctaaattggacaggtttttgtggttattactgagtataaacaaagcaaaggagagcgcagggatgaagagaattaaaacaggtgtgcggtttatatggttagggattttagagatcctgatgagtgttcttagatgtatcgctgggctgtttaacaaagctgtaaggaagcataaacggcggcggcttaggaggactacagagtatgtgcggagatacgggtatgagttgtctcttaattcacgggtgttactggcaggaagagcctattatgtattctcttatgagtttgctgaggatattgaaaataggagagaggtacggctgaatttaataggagtacctcagtacaaggaaatcataaggagggcaaagtaatgacaatcaatgagtatcagaaagccgctatgaggacggcaagtggagtaacaatatccacaaaggaaaacctcttactcaatggagtaatggggctgaatggggtagctggggagtgtattgacgctgtaaagaagtggatgtttcagggacacgaactgaataaagataagctggtgaaagagcttggagatgtttgctggtatctggctatcagtgctgaggcgttgggagtaactctggaggaagttatgcagagaaatgttgataagctttgggagagatacccggaaggctttgaggtggataagtctgtacacagacagccggaggagtgatgaatgaagaaaacgtgtggtaattgttggtatggcgatagaggaaaaaaaatattgctatggaagtatgatccagtgcaaaaagctcagaacggcggtaaacgtaaataaagaccgctctgggtgtaagagctggagtgataagccgccgatggaaagaccgtctttgggctattttggtgtaggtatgagatggtaagggaggaaaagtagtgaaattgagtgagtttgtaacaaagcctttaggagaggctattgcggagctgaatttagttgatgcgaagattcatacagacaatgagggaaatgtggaggcggtagagctgaaatatgagcctgagcatgagaataaatctgaaccgagaaaggtgggaagattttgagatggtatgcagtagcgaaaatcaggagaaatgtttccattcaaagattcggcaggagttacagggccattatgataagctgattgaggagcttctgggaaagagttattacaattatgggatggatgtgtattctaataatgcgtatgctttggaggatatgttgaaggaaataaagaggatgaaaagagcaatcttgatattgaggatcatcttggcaatgaatgtagctttttgtgtaatgcttttggtagcaatcaacttgaaataaggaggacaaggacatgaagaaggcaatgttatctcagccaatggcaggaaaaacagatgaggagattgtagcaacgaaggaaagggctgtagtggcactcaatgcgagagggtatgtagtggtaaacacactctttactgatgagtggtatagtaaagaaaagatggaggagagaggtgtggttcagatccccctttgcttccttgcaaagtccttagagagtatgagcttgtgtcatgcggcgtatttctgcaaaggctgggagaatgccagaggatgtaagttagagcatgatgcggctgtagcctatgggttggaaattatttatgaggaggaaaataaagatgttgagtgataggattaagaatccggcacattatacagaagggcggaagcatgagcctaaagacgtgatccgggactgggggttaaatttcaatctgggtaatgctgtaaaatacatatcaagagccgggagaaaggatgatattgtacaggatctcaaaaaggctcagcaatacttacagtttgaggttgacgcattggagggagagcgtaaggagccggaaagcctttgagtgaatgatctggtaaaagaataaaacggactggggagggcggaggctctccctttttgattataaggaggaaatttggatatgggaggttatattgcggcgtttgtaggggggctggtgttgggatgccttgtaggtgtctttgtgatgtgtttatgtattgtaggagattatggagatccttatttagaggggagtgagtgggatggagatagggaagatagcagttctgagaaagaataagagtgttttggtagaagtaaagaaaatctctgatggggatattgccacagtggaaatgtgctcaggaggggtagtattcaagatccagctttcagaactggaggagataggagctgtacagtgtcatagagaggcagagagaggggtacatatcttaggcactcaatataagatcttgattatcccggaggggaactatcggtttagccgggatgctgatgggtgggtagatacctcatctaaagagattttgatttttaactttttacagagtgtagagagcgttcgggatctggaggcgtaccagagaaaggtattgcggcatgagattgtacacgcttttctttatgagagtggattatggcaaaatagcgtaaaaagtgagtgttgggctcaaaatgaggagatggtggactggatagccatacaatatcctaagctcagagaggcgtttaaggaggctggatgtgatgagaaataagaagaaagaggagaatatggaggtaggaggggcttgtagaggatttctgtaccttagaaaccatagagtaataaaggtaaagggaagaggttacaggtgtaaatattgtgaccgtactttatttgacattagaaatgaatcggaaaggaagaaaagaagatgaattatgaagtattatggagggatttgcagatattcctctggattgtaggggtggcgtggtgctggtacatgatgaatagcaataagaattattttagttttcggtcaggagatgagaaaaatactctttcctgtaatttggtggcgtggctggtgctgatgatcgtgtgtattgtgaagtgtgcgaagatgtttatgtaaagctgagggagaggcgaaagcttctctcatttttgtaagagaggaggttaaggggtgaatgtattagatagtgtatggatgccgcaggagaaaaaggatatgattattagggaaattgtcctaacagccgatttccaaacggcttattatactgtatgtaaatatattacctgtagaactctccagcctttacatataagccttattgataacatatcaaacaatttatcatctatggatcttgctccccgtggatttggtaaaagtacggtgggggatgtggattattgcattaccagaatactcagagatccgaatgtgagaattatgataggcagtaaaactcaaactcaggccgaagcttttttgaaagaggtaaggacacattttgagcaaaatgtaaacttggtccgtattttcggggactggagaagaagccgggataatgtttggaatgataaggagtttacagtaaaccgccgcacaataatcaagaaagaggccacactgacagcattaggagcctcaggagccgttgtttctaagcactttgatgtgattataggtgatgatttagtaggctttgaaaatgcccgtacagaggctcagaggaagaaattaaaggagtggttttatagttcgctctttcctacattggagccggatggggaaatacacattctgggaactcggtatagcccgttagatctgtatgaggatctgataaagagcaaaaattataaagtgaatatccagagagctataaacgtaaaagaagggcatgagtgctctctttgggaggataagttttctctggcaaggcttacaaagatccgggaagagagtgggctgattatttttaatatgcagtatcagaatgatacagagcttgcaaagggaaagattttcaaatacaaatacttccggcattttgaagagtacaagattgattatgatttgggtagggtaaaggttaaggtacaggacgcaaatggagtatcattctggatcccggtaagggtgtatatgggtgctgaccttgccatatctgagaatgaaaatgagaacaatgattattttgtattgacagtgataggcgtggataaggataaaaatgtgtatgtattagattatttgaaagaacggcttacctttaatgctcagcttaatgccattctggactatgggaaaaataaatttcctatggtggagaggattggtgtggaaacagtgcagtatcagaaatctcttgcacaggaaataaggcggttgagtttgttgcctgtggttaatattacaacaagtaaggataaggttacaagggctatgcgaagatctgcactgtttgagaacggaaaagtatatttcaggattggaatggaagatttggaagagtgcttattgttattcccggatgtggatcatgatgatttatttgacggtttagattttgctatgacggtagcagatcagggcaatgctgtaagggtactgaaaagagatgattttgacagattatagagggccgggaggctcttttttctttgcgtaaaggaggtagagaaaggtgattgtagaaagaccaaaggatggggagttaaatattgaggtggtagaaagtcattttaatgtagcgttactggatgatctggtagattaccacctgaaaaagaaagttccaaaatataaaaggtttcagaggctttatgagggtaaggcaaagatttttaataaaaagaaaagcggagctacccagaataagaaaaagccttgtaataagcttgcaaatgattttatgggacagatcattgatactacagtgggctatttcttgggaaatcctattgtggtgaattatgttgagaaaccaaataaagaggcggcgggaagaaaaacggctgaggctgatgtaggagtggatctggatgaggtaaggggatcagataccgctgtacaggatgaaatagacgggattttctctgataactacaaagatgatttatttatggagtggggaaaagaggccatgataaaaagtgtttctcatcttctcgtttatcaagatgaaatgagcgttacccggattatacatttgaaagcagaggatgttattgtggtgtatgataacagttctacaaagaaagctcagtataaaatcaggctgtattacattgatacagaggacacaaataaatctgagctgtatgcagaggtgtatagtgccacaaagatggaactgtttaagagaacaaatgatgttacggcccccggttctgtgagaggatttcagtttgtaaaggaaactcctcacatatatggacggattccaattataactctgtacaataatgaggaggagctgtctgatctggaaaaagtagaaactctggtaaatgactatgacagggttatgagtgatgtatcagacgagtttgaggctttccgaaacgcttatctggttattaaggatatggtaatgaatggggatagcctccagaagcttaaagaggaggggattgtagaggtaacagatgctggagatatgcgctttgttacaaaggaaattcagacagacgctattacaagccatttggacaggctggagaagaatatacataaatttgctcaggttcccgatctgtcagatgagaattttgcaaataatctttctggagtagctattcgctttaagctctttgggctggaaacaaagtgtattacaaaagagcgtaaaatggacaaggccataagacagcttttagaggtattgtcggttccgattagggtaaagaccgggaaggaaattgatttaagaaacgtaaaaatggaattttcccggaatgtgccgaacaatctcacagagattgtagatactgttactaaattagacggaaaggttgatgatgaaaccctcctgagcttattgccatttgtggataatccgaatgatgttctggaaaaaattagaaaacaggcaaaggagaaacagaagcaggaagatccatatagttttgataatatacaggcggatggaaatattccatttccagatctgaaccagcaaaacaggaaagtaagctcatttttaggaggcatgagggaggagtaataccgtggctgattattatgtaaatgaggaagtacggaaaatgtacgggatccctctcagccaacttacttctgagcaaaggagaatactgagggaggatggaaaacgcagaaagaagcttatagaggagcggcaaaaggatgtaatgcaaaataaccggaaagccttcgatgatgttgagaaaatgaacaaagttttagtctccatttattctcagtgtcagaaggagatccttgcggatgtttcagaaacaatagcaaaagtgaaaaaggctggaggggagtggagttacgcaaaccagagcgcacttacccggagccgtgggctgtttgaacagattaacaaagagttggttaagttgggaaaaacagaacaaacttatttccgtgaaaatcttgctaatatctatacagatcaatttttaagaactatttatactctggggcagactcagcctctccaaatgaacgggagttttaatatgattaattcccgtctggtggaggcggctttaaattatccgtggagtggtgcaatgttttcagataggctctggctggataaggataggctggggagaaatctaagggtaggacttactcagtctatgatcttaggtgaagatatggacaagataacggatagaatacaggcgaatattgatacaagtcgttataatgccatgagaatagcccgtacagagacaaagagagtaacttatgtatctcaggtagccgcatggaaagaacaggggataaagaaagttcggtatatgacggcgaacaatgggggagatagtcgtacttgtgatctttgtagagctgatagtggaaaagagtatgttttgggtgaggagcctacgttacccagacaccctaactgtagatgttggtatgttccggtaactcctgatacttttggagataatgagctgaatgagcttacaggatccgtaagaggtgctgagaattacgaaaagtggaaacaggaatatgaggttgcccttaatcctgatggatcttacaaaccgggatggaagagggaaagttggaaagacggcggaagagtaatgtttacggcggctgatggaaaaaagtataccttacaagaatataaagaagctgtaaaaaatgggatgtttggggctgtggaaaggcccacggctgaggatctaatacgaaaggatactgaacagaaaaggcaggaaggagaggtttataggagaggggtacaagctcaaattgcggcaaagcaagaacttcatagcaatattccttctgagtatgcagatcagatagcagaagtagaaaagcaaaaagctgtacaatctgctataatgaaggagcggggtgttgatattgatgagatagatctggagctggacagaataaagggtagaaagcaagaattatatgatctttttgatacaggaaagcttacggaggatgatctggatgagcttcttctaaagattagagcagataggaaagatttgagggcgttaagggctgttaaggaaagcgatatttatactgcctcttttgagatagacaagcttaatctggaaatccagaggatccagcaggaaattaagaaaaagcaaggtgatattttagctgaggttattaagctggaggatcaggtaaaggaaagccttgcaagagaaatagattttgatctggatatagcttatgttggagacagcatggagcggtatgaaactgtagagcagtttaggacgctcagagaagttcttagaggcaattcaagctttgacatggataaatataaggatgagcttgtacaaatggctcagagaatggataaggacgctcttacgatacatcaaaagctttctaagataacctcagcaaattcctataattctcccggaggtgcggcatactggccgggagagcgtagggtaaagatggacatgggaagtaatacacatgagaaacaccttgggaatgggcttagaggtagctggcagacaaaatatcatgaggaaggacaccaattagatcatttgttaggcaaggttactcagtttggagaaactgtggaggatagcggttcattttattatcttaaagattttacatatccgggatctgtgagcggaaaaaagattacagcggctattgaaagtgatattataaagtttttgaacacatccatagagtatagcaatgataaagaggggcagagttataagcctattaagggattaacaagaatttcctcagatgccagatatgcgtttgcacggtacatggggtatcttacttctaatggggcagatgcaaaggtaagctgtcagttgggtgtatttactgatgctatcggattatttacaaaggataaattgagtagaaacactttaccttttggtggctggggacattccagtgcgtataataaggatagagggaaagctggagcaaattctgaaacttgggctaccttttgtgcattgcgtacttgtggaaataaagaggaaatagagatgatgaaacaagttatgccagaaacatgggattgcatggacagaatttttcatgaggtagcagtatatctggagaaaaatgagttgagttattgaggaggtgaaaattttgggaaaagtagagtatgatgctgtacaaaaagagatctttggaatgacggtagtaggaagagcatacttagagtacaatgaaaaggtgggaggtgagccttttgggtatactgtaggtatgccgtacattgatattgaaaaagagtatggaggtttagtagggctgtaccatgagtgtgttagacaaggaaagacatgggaagagcttttacatacaaatggaaaatgggatgaacttccggaggaatgattgacaataacccttacaggtaaatgaacgcctgtaagggaatatttttttttattattttgttttgttagtggctgacaagagattgcataatcacacttatatgtagagggtaatttacatgaaacctacgggggttatgtaatattaaacttatgaaaaggaggattttagaaatggaaggaaatgtaactgaaacaaaaactacaggagcagagagtaccgccgctgttactggagctgaaaatactgaaacaactacagcaagctctacagataaaagcggatccggagccgcaaagactgaggagcagattagagctgaggttgccgctgaactggaagctgagtatgaaaagctggctgataaaagggtgacagatgctcagaagaaatggaaagctgaggctgataagaaagccgctctggagaaaatgacagaggaagagcgcagacgggcagaagaagatcagagagcaaaagaacaggccgtaaaagagcatgagttagtaattaaaggattgcgtctggatgttgtggatgctgtggcagagctgggactggatgccggatttagaaatctgattgcagttgaggatctggctctcattgctgatgaggcagagagaaagacaaagctcacggaaagagttaagggtatgaagtctctgtttgactccgaagtaaagaaacaggttgcaaaggaaaaggctgaatttctgaaagggcagacacctccggcaagtaaggaaaagaccggagataagtcttacaatgattataggaaagccggaaatgtgagaggcatgatcggtgaaaaacttaatgggttgtttaacggtgaggagtgatcctcacctattttattttaaggaggaatatttattatggcagaaatggtaaaaagaaaagattttctggagaatgaggtggttgatctccgcgaagagatcgcactggtatctcctacagatacacctcttactactctgttaatgggtagaggggcagttgttccggctacggatattaccgtaacatggagagagcgtaagctgaatgaggatcgtggtacgttgaagcttgaaggtgctgaggctggagatccgatcaagtccagccgtggaacactttctaatgtgtgccagatcattgagaaagttacacaggtttccggtacggctgaaaagcttaatccgaaaggtatcggatccagttttaacgctgaggttgctgatcgtctgattgagacaaagcgggatctggaatggtatttcctgaacggtgtaagagcggcagaaacagaggatacaccccgtcagatgaatgggcttattaatctggttaatactgagaatgtgttggatgctacagcgggactttcggaggagctgatgctggatgcaatgcagaagatgtgggatcacggatctcagggtgagtatttcacttttgtaaacgcttctgtaaagagacagctcaataatttgctgaaatcggcggcaaatatccgtatcaacattgaaaatggtttagctcaaactatgggaatcactgttcagaaggtggaaagtgactttggtactctcaatctggtgctgaaccgtcatatggatgtaaatactatgcttattctggatctggatcaggtgcagattgcagagttgagaggaactttctttgagatgctcccgaagtccggcgattatcataagggacatatcctgaatgagagtacaattaagcttctgaatagttattctggagctaagcttatcaatatcggaaaagcctgaaattagaggccgaaaaatataaggaggtaagaaactatggcaaacacaaagacggcggtagaaaaagccgctcagaactttacagagacagtggaagtacaggaggcacctgttaaaagggtgtatgagctgagatctacgaataagtttttgacggtatcggctcttggcgtacagtttatgaggggacgttataagacggataacccggtgattgcaaaggtccttttgaactatgaaggagtagagctggtagaggattaaggaggtagcctatggacagcttagaaaggtgccggattatcttaggattttctcaggataataaggaaaaactggctttgatagaggtgtatctggaaaaggccagagaagatattgaggctgtttgtagagatgattttctggatcctgatactggaaaagatatttttccgaaacagcttaaaagtgtacaggaggatcttgcacttgctcggtatcgtaagagacaggctgagggatactcttctcaatctttaggggatgaagatacttcttttgaggaatatttcccggatagtattaaacagcgtttatatccgtttacacggcttattccccggaggtgagtgtatgttttactatgacaaaaagtgtattgtgaagcgttatagctctactttgagagagtataaccgccctcagaataaactcactaatgtaggctcttatgaatgtacctacatgaatacccagaatagcacaagtcaattagagccgcaaaaggataattatacaggaattacgttgtatgctgatcctgatgcagatatccggttaggagatgtattgtatatttatgagttggatgagtatggaaatataattctcagctcagaatatatagtggttgcagataagccatacaagaaacgtacccatttagaagtaccgttgacatatgatgaggaggtgtagtcatggcctcatttgaagtacccggctgggaagagtttgtaaaaagagctgagggagttgtggataattgggaagcaaaaaaacttgttcttatggaaagaatggcaaatatctgtttagaggagatatctcctcttattccggtagatacctctaatttggtaagcaaatttcagatagggaaaataatcccggatgaggcagaggtggggacaaatgttgaatatgctctttatgtaaacgacggtcatgtacaacatagacgatttcttccgatttcctatttatctgtaaatggacagaaaaagtatgtacattctatgaaaaggggtggtaaaagtccgggaggtattatgctgaaagagaggtatgtacccggaaaacattttctggaaaagggaacagaaaacgcaaagccccggattaagacattaggtgagagtttcatggagcaaataggcagagaaatagagggggcaggaatgtaatgagattgctaaacagtgtatgcaagctgttagcctcaaaatatactggtatccctgtttatgttgagggtgcgccagaaggatttaaacgtccttcattcatggtaacgcttgctacagaggggacggccctcaaaaataaaaatgtgtatgaggatacaccaatatttaagattgtgtactttagccgtaaaaatgtggcaggacaagtgtattcggaagatctgtacaagaaaaaggaagagctaaaagctctttttttattgcccggatgtatccccgtaattcccagtgagggggttaaggagaaaaagcggtatgcaaaagtaacctcattcacctcagaagtgaggttgtcggaaaaaagtctgtatgtaaaggtcggattgtcctttacagaggatgcccggaaaccagaggagtatgagtttattgaagatattgatctggaaatgaaccgatcaaaaaattattaaggaggagatagtaatgggattacctgatattatgattgaatttgtcaaaaaggcaatcacaacaatttcaatcggtactggtggagttgtcggtatcatcatcaaggatgctaagtggaacggctcccatgtgctgaaaagcatcgaggcggtatctgaggaactgtctgcggaaaataaagcatatgttgagagagcctttctgggaacgccgaacgctgttcatgtgtatgttcttccggcagaagctcagaattatacagaggcgttcaagtattttgcaaacaagaagatcaattacctttgcggagatccggagattaccacggagcaggctactacccttgccacatgggttaagggtaagagaaagactatgaagatccagcctgtagccgtagtaccgggggttaagggggacagtgagggggttgtaaatgttggctttgtcaatggagacactatttccgctggcacagttacatttaccccggctcagttttgttccagaattgccgggcttttggctgggctgtctcttactcagtcggctacatacgcctcccttccggagattacggcaatcccggaggtggatgatgacgaggtagtagatacggcgattgatggcggcatgttggttccgtatgatacgggatccggcattgtgatcggtagagccgtaaactcactgacaacgtttactcaggagaaaactgaggatctgaaaaagattaagatcgttgctattcaggacaggatcacggcggatattctggacacgattaactccagctatgtaggtaagtacagtaattcttacgataacaagtgtttgctgattactgcgatcaagggctaccttacccagttggaacaggctggatacatcgagaaagacaagtccacaatggaaatcaacgtggagaagcagagggcttatctggagagcacgggggtagatacttctgagatggaagagcaggacattaaagaggcaaataccggatctcatgtattcctgaaaggctctgtgtctattctggacgctatcgaagatgttgacatccttattaacaaggaataagaggggaggtagaaaagcatggttgagacaaaacgtatttgtaacggtacttttggagaaatctggctggatagcgactatgtaggtgagtgctataaggctcaggcaaaggtagagtttaacaaagaagagatcaagcagtgcggtgactggtatgtggatgataaggtggtaggttgcaaaggtaaaggatcccttaccctttacaaagtcaatacccgtatggggatcaagatcgctaagatgatcaagaacaagcaggacatccggtttaaggtcatctcgaagctgaaagatccggatgcttacggggctgagcgtgtagcgattaccggagtatcctttgacgatctcacactgtttgattgggaagcggctaagccgggtgaggttgaaacgccgtttacctttactgggtatgagtatctggatcagattaagccacgataagagggctgagaagagaataagagtgaatgaggggcgttgaaaagcgtccctcaaattttttgaattataggaggatgaaatatcatggcaaaagtagtaaatatggaaaattctgaaaatacagttgtagcaaagaatccggtgaacgtgctggatcttttgctggggggagatgctggaaagatcaaaaccccgtttatggatgtggaaattacccggctttctgaggcgtttggtgagccgtttgtagtccgctgtgaagcactctccccggataagtatgaggagttgcaggaaatctcaatcaatattcagggcaaggatgtggatatggatgtgaataccttccagaaacttaccgtgattgagggcgttaaggcggtagtggtagatgcggctggaaattgtacggctggtggcttgctcctgaaaaataatgagcttatggacaaattcaaggctcatactccgaaggatctttgtaacatgatcttcctttccggtgaggtggtgagcttgtatcagacgatctccgaactcagcggattctcggaaacggcgattaagaaggtaaaaaactaatagacacggacggacttacaaacctcatgtattattactggaggcataaggggatccgtccgtccgttttctattccatgccaaaaggtgaactaactgtaattcaggctttctatgagagggagattgaagatagggacaggatattaaaggaaatggatgggaaagtattctgtccgtatcaactctttatgtaggaggtggcagtattgatagagtttggtgcaaaactttccttgaaagacgctatgtatgctacccttgtgaagaatgtacagcagatgcggcagtttcaggatgaggtaaactccacaagagaggctttagatagggctaccaatgggagatacaatgtggatgtagaaacctctgcggctcagagaaaccttgataatgtgagggaaaatctggagcgtatgcgttctcaggatgtgaccgctacagttggggtagatgcttcacaggctcatagagaggctgatagtgtccgggaaacagtggaacagctcagaactccggtacagttaaggattgaggcaaatgatgcggaagcacagagaaaagtacaggcattgaaagcccgtatgcaggagcttgcaaacagagcaatagctccggtgatacggctgagagatcaaacctctgggcggctggagggcgtcagattgcgactgaacgaagtggggcatagaattgtagctccagttgtaaaactccgggataacgcctctcagaagctcacagaggtaaagcgtaggctggagctgttagcaaatagggtaatagctccagctattgtattaagagacaatgtaacggtaggacttaacaagattaagtcctattttaatgctgtaaaagaggtttttgtaaagcctcttgtaatcagtgtgagggacagggcaacggcggctattcagaaagtaagatccgggatggttgccctaaaaaatatggttgtagctcctgtactgagagtaaaggatacagctacacgggtgataaacaatgtgaggagtaaagtgagggctatagggaaagctgtagcaactccgatcattaaagtgaaagatacagctacaaaggtgcttacaaaggtgtctgggaaaatgaaagagatcggtcgtaaagtggcggctccgatcattaaagtaaaggacacggcaagtaagataatcagtaatgtatctgggaaattaaaagcaatcggcagtaaaatagccgctccaattatcaaggcaaaggatgccgcaagtgctgtactcggcaaaataggcggtatgctcaaaacactggcaaagggcgtaaccattgctataggtgttgccggggctggggcggctatggctttaaagggcggcggtatgctggagcaacagcagatctccattgagcactttgtaggcgtaaacaatcaggacgctacaggggatcaggtaaagcagatgagtgaggcatacattaccgctttgaggaacaatgcaaatgctactccttttaccacaaatgaggttatagccgctggtacaagagctgttaatgtagcctccggcaatacggaacaggctatgaatatcctgaaagtggctgaggatatggcggctctgaaccctgaaaaatctttgtctgacgcaatggaagctctggcagacttaaaaaccggggaaacagagagaatgaaagaatttggtttcaaaatctctcaggaggatattaaaaacgccgggggcgttgataagattctggaggatcagatcaaaccatactttgaaggtggagcggctaagctggctacaagtgcctccggtttggtgtccactattcagggtaaattaagctcttttgtatctgatacaggcttgaaaatgatagagcgtgtaaaaccgctcttagagcaattggtacaggtagtagatgctattatgcctaagctggatgcctttggtacaaagctggctgatggctttggaaaggctgtagattttgtttccggtctgatttcaaagactggtttagtatcctcctcaatgaataaggtggggagtgctgtaacgaaagccgggaaggggattggaaatgtatctaagcaagtgacaaagtatgtagggtatacggtgaagagtggggacacactctcaaagattgctaagcagtacgggactacatatcaggagcttgcaaagtataacaagatcgcagatcctaacatgattttctcagggcaggagatcaaagtacctactaaagtaatggaaaccacgtcctccgctccggtggaggctacagcagataccccggacacaggggcggcaagctcccagttatcggcgtttggtgcgctggtatcttctgtagtaggaatggtaagcacttcatttaatgccctgaaagagtgcgtttctgctacggttgggacggtaacggctataattccgaatatgttaagtgcggctactatggtatttaccagcattactccattgattgagacggcgaaagatatttttgtagccgctcagccaatagttgagggggttatttccggcatatgtgaggcggttgaggtgattgtacctccgctggcaaacgcatttaataaagtcggtcaagctgtccagaaggttgtaggcgtaatttctaaacacatgggattgtttaagagtgtggtgtctacggtatctccgatcattgctacagcaatagattatctgggtactgttttctcggcggctggtactgtgataagcggtgctctggatgcggttttatccgtggcagagagcgtattttctacactggagccgattattacagacgcttggggaataatctctggcgtgtttgagacagccggggggatcattacagaagttgccggggtaatctccggggctatgggtactctgagcggatatattaccagtgcattaagctttctttccccgtatatctcctcggcgtgggagtggatcaaatctactttcatgcaagctgggggagtgattggacaggcggtaagtctgataggatctgtattacaggtgctttggagtggtgtaacggcggtatttgatttcttggctccgtatcttccggcaatatgggaaggtattaccacagcttttagtgtggctggtgatgtgatttccggggcaatcggaattataagtggcgttttaaccacgttgcagatcgcttttacagcggtttgtgatttcttagctccttatattccgggtatctgggaaggaatacagacagcatttactacagccagggacgtaatctccggggcggtgagtgtgatttctggtgttattgatacacttagtagcgttttctctggggtgttctcagctatctccggtgtggtgtctggggtatgggatgctataacgggcttcttctctggaggctctgacagcctgagtacatctacttccggggtgagcggtactattagtacactttccggggtattctcaggagtattttctgggatctctggtattgttgagggcgtgtggagtgctgtaacgggagcttttgacttggcaagcggagctatttccggggcggttgacgctatctccggtgttgtcggaggaatagctgatttcttctctggagggcttagcggcttgggtgagatcgcttctggcgcatgggaagcggtaacaggagcttttgatggtgcaagcacgttaatttctggagctattgaggggatcagcaccacagtaggcggaataggagagcttttttccggtgcgctggaagggatccccgatgtggtttctggagcgtgggaacttatttccggggcgtttgatactggagccggattacttgataccgctttgagtggtgtaggatctgtgctggatggtatcggatccacggtaacaggagctttagaggggcttggatctttaattggtgatgcgtgggatggtatttgtggctttttctctggaggatcagaggaggtaggaacctcagcccccacagcagaggcaagtgtacaggcttatcaaacggcattcgatcaaatgaatgctatggctccacaggtagagagtgcatggagtagcatttccacggcgtacagctccggcacagaggggattacctctacaaacgatattttaactacctcacttactacaatcagtgaggcgtttactacagcttttacggctatagggacagcgtctacaaatgggtggaataaggttaatacagtgtttaccagcatggggacggggcttacttctgttcagacaggtactactacagtctggttagggattgctcaggcttttgcaaacggaaacacagctacagccgcctcaatgacggcagtaaaaacaaaccttacctctatgagcacacattttacaagtacctttagcacgattgtgagcaccactacatccgcatggaatagcgtaacaagcgcattcagcggagcggctggcagtatttccagctatgtaggtagtatcagcggtagcttatcctcactggctggggcgtttagctcgatggctggaagtgtggcggcaagctgtagcagtgcggtgagtgcggctaatgcaatggcaagctctatagcttcagcggcaagtagggcggcaagtgctgtagcaagtatgccctctggaggcggtgcaagccgtgcaatgggtgtagaccgtgtaccctatgataactacccgatcttagcgcatgagggtgaaaagcttcttacaaagcgtgaagcgaataactatgatgcggcaaattctacccgtggcatgagaatgataagccgtgcaatgggtacgggagaaatcagaaatgataactacccgatcttagcgcatgagggtgaaaagcttcttacaaagcaggaggtacggcaggaggaaacaaaaactcctgtacaggtgagtatctatgtagacaaggtagaaaaagaggctgatgtagatgcgattgtagaagagatggtaaggaagctcaataaggtaattcctacactgggataaaggaggatgggtatggaattttggttgaagaaatcaaactctgataaattcatgctaccagtaaacccagaatcctttgtgtttactgagaagcacaataatacctccgtgattgtgaacagtctgggagaggtaaatttacttggaaagaggggattaaaagagggtacaatctcctctttctttccgaacaggaattataatttctctgcaaattctggcaggaaaaagccctatgattatatcaataagcttttgggctggaaggagaaaggtactgttatcaggattatcataggtggcggcataaatgagcaagtcactattgaaagcctgaaatatggtgaacaggacggaacaggagatgtgtactatgatttaatgctaaaggaatacaggaaagtttctcttacaaagaggaaagttacaaaaaagaaaaaacctacggcaaagaaacagaagcgcactacagagaataagccgaaaatcaaaacttatacagtaaaatctggggattgtctttggaacattgcgaaaaagtattatgggaacggcgctcagtatacaaagatttataatgcaaaccgggacaaaatcaaaaacgcaaatttgatttatcccggtcaggtgttgaagataccgtaaaggaggggcatgagatgaaaattttgcatactttggcaaatgatattacagattatgttacctctatagaatggagcgggtcaaagcctcaatgtacccggaaacttgggatacaggtattaaatgctccgtatgataaaaatattaaaaagctcaatattaagcttggagaaaccctctatctgtattctgatgatatgaaaacagaatactttagagggtttattactgagcgtgaaagaagctctcaaactgggacaatcacttatacggcatatgacattggctattaccttacaaaaagtagtgcaacgtacaatttcaagggtaaaacggctgaaaccattacgaaagttgtgtgtgatgattttaaaatcccggtaggatctttagcaaagaccgggcatagccaaaagcttattgtgaagaactgtaagatctatgacattatcatgaaagcttacactcaggctcatcaagtcaataaaaaattgtacatggtgaaagccagcaaaggaaagctgaatgtagtagagtacggggcaacaatctgtatctatgagcttactgaggacacaaatatttacaaaagctcttataaagagagcctaagtaatatggtgaacaaagtaaaaatctatgacggggacggaaaacaaataggcgttgtggagagcaaatctaatcagaaatacggcatcttccaaaaaacgtacacgaaggaaaaagacaaaaacgctactacggcggctaagagcttgcttgcaggagtagagaaaacagccactattgaggctattggcatgatgcaggcggtaactggtaacggcataacgattgtagacagtgcaacaggcttaaaggggttgttttggattattgcagatacacatagatgggtgaagggtgtgcatactatgacgctctctcttgaatttaaaaaatccatggacgagaaggaggtgtgattattggcagataataacgcagatcagaattatgcagagctggctgggcttttccggcaaatgggggggatggataatccccagacgctttttatcgggacggtgaaaacgtggaaagaagataatatcaaaattgaagttgaggttgatgatcttattctggatcaggatgatattttggtagctgattatcttatgaatggtttcagatttcccttggaaactccttatgtgtccagtgttacctttggacattatgacggatcctataaaaccgttgatacagcggttaagcacagaaaaaagggcttaaagaaaggcgatctggtagctcttatgaaatgcaacgataatgacacctatgtactcttatgtaaggtggtgaaaccatgagtgaaacaggagggttattcccctttgatgatacagaggagtttccagtggttgaggaggatgctgaggagtatgtgatccgggattttgagattgactttagtaccatgagaatgaccgggagaatcgtggaaaatttggatgctatagagatgtgggtacagcttgcgctcagaacaaagcgttatgaatggctcattttttcatgggactatggggaagagtatacagatctgttagggtactcctacacaaaagaataccttgacagtgaagtagaacggatgattacagagtgtgttactcagcacccttatatcactggaatagaggatttaactgtggaggtggaagaggaacaccttcacataacttttacactgataacagactttggggaggtggaaatagatgtatgaggatcaaacctatgaggcggttctggaaagatgcttagacaactccagagacgatattgacaagacagagggcggtgtcttttatacagcaatcgccccggcgtgtctggagtttgcgatccattacacagagcttaacggcgttgttacggacggttacgcagatacttgtgatcgagagcatttaatactccggtgtaaagagcgtgggttgtctccacacccggctacaaaagctatcctaaaaggagagtttaatgtagatattggcgtgggacagcggttttctctggatgagctgaattatatatctgtaaagtatatcggcagaggagaggacgctgagagcggtacagggctgtactattatcagatggaatgtgaggcagtaggtacagagggaaacaagtattttggtgatctcaatgcgattgaatacatcactaatctggaggttgccagattaacggaggtacttattccggctgaggatgaggaggacactgaggctcttagaatccggtattttaattcttttgaaacggctccctttggcggcaacaaaaaggattacaaagaaaaaaccaatgccctaaacggagtaggggatacaaaggttatcccaacatggaacggcggcggaacggtaaagctaattatcattaacagtgattataacaaggcatctgatgtattggtggcagaaatacaagaggctatagatccgctgagcgatcagggcaacggatccggcattgctccagtagggcatacagttactgtagtgaccgtgaaggaaactcctatgagaatttccgcaaagctggtatacaaagagggctttagctggaaccgggtaggagcggagattactgagcttctggaggcgtatttattggaaatgagaaaagactgggctaaccagtcttttttaagtgttagaattactcagattgaagcccgaattttaaaggttgagggggttgtggatatttcggacacaaaaataaatggcgttgctgataacttcacgctggactatgacgctatcccggtagcctcagagctgggggtgatcattgatgagggatagtattaacatcttgaaatactggatcaaagaacttaggagactgaaagagtttcaggagcttgctaaggtttgggatattgaatttctcaggctttacggcggtactcagaaagcattgaacaatttttatattgaatatgcggatgagtatgggattagtcgtttagagaaagtaagcggcatatacccggatattaatgacaccttagagagccggagagcaaggctttatgtgtactggaatgacaaaaacccctacacagaggaggagcttatcagcagattagagaacatttgcggaaaaggaaatgttgaggtggtttttgattaccgcaatttcttgatccagattattactcatgttggagggtatggaatctttgatgaagttgctcggatgcttgattatttcttgccagctaaccttttgttggatttgcagaatgcgatctatggggagggatccaccgggatttactacggtgtgggaactactacagctatggcttataccgtgacgaacgatgtaaaagcggcttacccgttagagaacaatctgtacactggtttcccgttgctgattgcatcggggcatatggttacaaatgatattgaggaggaatatacctcaaatatgtctcttaatactggctctgggattgtacacgctacaggcgtgttagtaaccaatgacattgaagctacaggagattcaaatatggttctcaatgctggttccagtatgcttcacgctgtggaagtgttggtaacaaacgacattaactcacacgctgagttaagtgaggagaaaactgtaggaaatgcagtatctacctcaatggtaatcacaataaaggaggattaaggaaatggcacagtttaaaacagcagttattaccaaaaaaggagttgccctgatggggaagatcctgagtggtaatacaaagctcactttcagcaagatcgctacttctgataccacatacaggacagatcagttagcaaatttgacttccctttccggggtgaagcaggaggctcttattgctgaggtgaggaagaaaaatgacgctacagtacaggtaagcactcagttttccaatgtttctctgaaaactggatattatgcccgtacaatcggcttgtatgcagtggatccggctgagggggacatcttgtacagtgtttgcattgtagatgaggcggtatctaccccggattatatgccgccatataacggagtgggcgtgtccagtctcatcattaacatggtgacaacggtttccaatgcggcaaatgtgaccgttaatgtggatccggcggcatccgctacagtatctcaggttatggatttgcaggagcagattgatgatctgaaaggctttacgggatacatggatcaggatatttatggggttgaggttgactttgtaaaccggaaatgtactcggttggctggcgctgtggggcagagtgcaggagaattttttgacgttctggagccgtggggcggaagaaagagagttatgctctcagatgatggctatgagcttggtaagtttggagatccgtggtacacggagagcggcaagctggtacagcctgtaaaagtagaacttaccccggaaactggctccggagagaatcttactccggcaacttataagactttcccggtcggtacgcctatacaggtcatggtaaaacagcctaagcactgggtgaaggttgtacctctctccatgagcaaggctacctatggcagaggtttccagtttgataaagcccgtttctacgtatccccggtagcaaagcccggatttgtagtaaatgaggtatttcaggcggcgaacggcttagagcaggattgtatttatttttccgcttttgagggttgtctgtatgataccagtgcggcggcgtacattctggatgatgcacaggtagcagattttacagcagataccggagacaagctttgcagtattgccggggcaaagccagccagcggaaagacgcagagccttacccggaaaaatacccgtcagctttgcaaaaaccgtaatgctggcattgaagcggacaataaagccggagggctggggtggcgtcagcatgatattttcgctctgtctgtatctcagatcctcatgctggtagaatatgcacactttgatgtacaggctaagtgtggtaaggggcattgcaatacaacggatgacggagcttccaacatggcaatcaatacgggcggcacgtcctcacttggtaacagatccggcattgatccggatgggacagatggtaagtgctgtgtttcctatagaggagaggaaaacctttggggaaatatttggacttggcttgatggtattaacattgagtgcaagaacatccagaacgcttatctcaactcagataacctcacaatggtagacgataccaaagagggctatgaggaggctgggtttacccttagtcatgctggcggctgggtatctaagtttggctggaatgagaagcatccatatatcttcttaccgtctgagtgcaagggagcaagtaattttgtaggtgctcagcactgggagaatcatgcttacaatggttttatggttgctctcttgggcggtaggtggagtagtggcggtacttgctctccgtggtatctgagtgtgagtcatgcctccggtaatcgttatcgttttatcggcgggcggttgctgtatgtaccgcaggcggataagccgaagtatttacttcctgtattggcggcgtaatgcggcggaaagaaaattaaacattgattgtagacagggatcctcatggtgaggatccctgttttcataggtcattaataaggttggttttatggttactctcttgggcagtaagtggaataatggcggtacttgctctccatggtatctgaatgtgaataatacctccggtaatcgtaatcgtaatatcagcgggcagttgcaatgtgtacccttgtgaaaatgcaagcaaataaaaaaaatactgcgaaatagtgaccttgcctcttgacaaaacataaagcagacgggagctcccggactgggtaaaaagtatgtaaagggataccgataagaggagaaacccttgaaacgctgattaaaaatgatggttccaataaagggcggtttccctttggtacatacaaggagaaaaacattatgacaggtacaaaggatctctataaaagtatttgtagcatggataacctgtacagagcctatataaacgcaagaaagggcaagggctggtatcaggaagtaaaattgattgagaaaaagccttattattatctgacaggactgcaatatatgctcaaaaatcatctataccatacctcagagtatgagatttttatgctgactgaggggaagaaagcaagagaagtttataaattacctttcttcccggatcgtatttgtcaatgggctattttgcaagtaattgaaccattcttaatagcacatatgacgaaagatacatacagtgcaattccgaggagaggaatacagcctattgtaaatgattttaagggttactataaaataaggaaggttgacggtaaagagaaatctgtttgggtgccgtccatattggtatctgatgaggagggaacaaggtactgttataagattgatgtacatcattattatcagtctattaaccatgaaattttaaaacagaaattcagaaaattgtttaaagatccagagctgatctggatattggatgagattatagacagtgttgcaacagcacatatagaggacttgtctaagatttatcttcttgaggaggatattgatccagaaacaggtattcctattggaaactatataagccagtacagcggaaatttttatttaagtagtttcgatcactggattaaagaggaaatgcacgttaaatattattacaggtatatggatgatattgtgatcctcaatgatagcaaagaatttttacatgaattgcataagaaagtagaggcttacttaactggaaatttacgcctaagtattaaggggaattatcaaatattcccgtctaaggtaaggggtattgattttgttggttacagattttttggagaatataccttacttagaaaaagtacagccctcacattgaaaagaaaaatgaggaatttcaagaaaaatatggaaaatgatataacaccttcctacggggaatggtgctcttttaacagctataaagggtggctcttaaattgtgatagttacaggctatctaagaagtatgtagagccccttataggatatatgcaagattactatgaaagggaggtaaagcatgatggtagtttacgaaaatgtgagatccagtgccgacacggtggaggagctggagatcaacgaacagtccgttattgtgcgtagtgggattacttctgtaaatgatcccggcactgaggaaaattccggttttagcggctggaaaattgccagagaagaagtctatgagaaagatgagtatatcaagctcatggctgaaaagaatggctctttagaacagcaagctacagatatgcagatggcgttgtgtgatgtgtatgagatgatgctggcttagccgggaaggagaatagtcatggtaaaaatctatgctgaattaatcaggaaaggattaaaaactctgtcagatgtgccggataaaatcagggcagaggtaagagctttcttggaaagtgaggaaaattgatatgcttatcaatttattaagagtatttttcagaaaggaggtgttcattatggcagttatttacgctactcttattgtcaagggaaagaaaacctttgcagaagtaccggagaaaatcaaagatcaggtaaaagaaattcttattgatctggaagtccctgagctggctgagtaattgaggagtagtgccccgcctttatattatgacaggaaggaggaagcaatggtgtgaccgaagaagctttaagagactttgaggggaggcttgctcaccttgaagaaagagccaaaagcaatactcataggctcaatgagcatgatgaggctatgaaagagcagagtgctcttataggggcgatcaaagagctggcaatagaaactaagtacatgagggaggatcttaataataccattcagaggcttaataggctggaaaatcagagtggtgataaatgggaaaaattcaaatggcttattgtagcttgcttagtgactattgtgttaggttatctggctgtacaagttggattaaaataggaggtgatccactttatctatcaggaaaaataagcggcatagtttttcctgattataagtgccggaaaaaggaggagaatagatcatggattttacaagttatctgattgataaaatgctgatccttgtacctgtactgtacattttgggaatgttcgtaaagagtacacctaaggtaaaggattggcttatcccgtggattattctgggacttgcgctgatcggtgcgctggctatcggaattgcgtccgggattcctattgtggatgctgtcattcaaggtattttggtagctggtgtaacggtattcacaaatcagctcgttgtacagacgaaagcaaaagaataataaattatgcagaaagagagtgcctatcatgggtactctctttatttttccgaaaggggtgagtgcagatgttaagcacaaaaaataaagaaatcctcagaaagattatttatgcagtagaaaccggaggacagatatacggcagtgctgattattcctcattaattgaggcgtatgctaatactccagcagaaacggcgattacaataggagccggacagtggtttgcaaatgaggctaagaagttgctccagaatatcctcacagccgccccggaaacctttagaaaattagatacagcgaaggtagaggcagacctgagtaaagactggagcaattaccagattaaaaagacatcagcgaaagcaaaagcgattaaaaaaatcatttccacagatacgggcaaattggagcaagataagcttatggatgctcagatggaggtttatgtagctgacgctgaggctttgggagcaacgaatccggcggcggctatgatgtgtgcaaacttccggcaccacggcggctacagtgccatgataagggtgctgggaaaaacggctaaaccctatactctggatcatatttatgccgcttgccagacggatacaggaaatcaggtgggggcatataagtcccgtcagaaatttgtatataccacacttaaaagtatggtggaaacagaaaaggaggagagtaaggtgggagttacagctaaacaggttgtggatgtaatgaatagctggatcggcctgagcagagcaaaaggcactcataagcctatcattgatctgtataacagtcacaagccgctggcccgtggatatgcggttacatatcaggatagttattgtgataccacagtttcagccgcttttatcaagctgggagcggtagatctgattggaggcactgagtgcggagttgaggagcatatcaagctctttaaagcaaagggtatctggattgaagatggtacggtagtgccggaggttggttatatttgttgctataattgggataaggccacacagcctaatgatggctatgcggatcatatcggtgttgtagccagtgtaaataaatccgctggtacttttgtagtaacagagggaaatatggatggcggtgtagtaggccagcgtatagtaaaagtaggatggggctatatccgtggatttgcggcccctaaatatgcgaagcctaacaattctacacctacagaggaaaaaccgcaggaaacggtaaataatggctctcagggaggaactgagagagtgtacacagtacaggcaggagatacactttctgctatcgctaagaagtatgggactacatacaaaaagcttgcacagtacaacaatatttctgatccgaatatgatttctgtaggacagaaaattaagatcccggctacttcctcttccactacctcaactcaaaatgctacttcccatacggtgaaagctggagatacactttcggcgattgctaaaaagtatgggactacagtacaggtgttggtagatctgaacggcattaaagataaggatattatcaatgtaggacaggttatcaagcttccgggtacagcgggactttttgtgggttgccgggtacaggttaagagatctgctacaatgtatgctacagggcagagtattgccagctttgtaaagggatcatcttatacggtaattcaggtgggagatggtaaatgcttactcagcggtattgtgagttgggtaaggaatgaggatttgacactcttataattcaaaagaattattttatagaggggaggcgttatcagtgtaagggctggtaacgcccatttttttttgttgatgaggtggttgagggtagactttttatcaaaaacctatataataagattaagatattttttaaaacctatataataacaggaggcacaggatgaataacaggaaagtgaaacaatttttaggactccgggttgttttttatgcaagggttagtacagaggaggaggctcagcttaacgccatagaattacagattgaggaaaatagagctgtaatagaagaaaatggggggatattggtagatgaatatgtggatcggggaaagtccgggacacaaattaaacggcgtggagagtatcaaaggcttttagctgatatggaactggataaatttgatattattgtagtgaaatctcaggacagactacagaggaatacaaaagattggtatatttttgtagataaattggtgagcaatcataagagactttatctgtacttagagaacaagttttttaccccggctgatgatgcgcttatcacaggaataaaagcaatattggcagaagaatatagccgggatctctctaagaaactgaataactcagcccaaagaaggattgagaaagtgaggaacggcgaaaaggtaactgctatgggtactaatatgtgttacgggtactacattaaaaatggtgagtggtgtgttgatccagagcaagctaaaattgcaaaattaatgtatgatttgtacctgaaatatgatagtatcaggaaagtaacggatgctcttaatgaactgggatacagaaatcaaaaaggtggtaaattttgttgtgacagtatagcccgtgtactcaaaaatccccggtataaaggtactcttgtggtaaatagatttcaccggaattttgaggagaagcgagttgagaaaaggccccgtgaagaatgggtagtacaggataatgcttttgaggccgtagtggatgctgaaacgtgggaggaagtaaacaggaggctgggggataaacgtgcaaatgataggggaaagaaagtaagccgggatcctttaggcggaaaaatgtattgtggagagtgtggagctcttctttggaggcataagtcagggggatattacggttggtattgttcccaaaagatgagccggggaaagtctgcctgtgtcggaactgctatttctcaaataaagatcagctcagtgttaaaagaattgagtaaagagctggtagtgaataagacggctgtcaaaaaatctatgctggaatggctgtacagtctcaaaaattctctcagtgcgggtaatgatattacagctatagagaacgatttggagagactaaaaagaaagaaagcgaagcttacagaggcatatttggatgagatcatttcaaaagatgattacagagtaaaatatgctgagattgagaaatctatctcagagctggagcaacagctttttcctgtagaggaaaatgaggatattaaggacatagagaagattatagcaaatatagataaggagctggatctgtggatccctacagaagattttgaggaaaacaaaattgatttcctcatagagcatactcagaaaattactctaagccgggaaaagcacctgataatagagttggatttaattgcgggggctataatagctggaaaggattttttactgtttgttagtgaaagtatgccgttccccaatggctgaatttgttttaaaagacatggtgcaaaaaagctccctgcaggaccagttcttcatagcctcagcggccaccagcacagaggaaatcggtaacccggtccaccacggtacgagaaataagctgaagcaatacggcatttccacagcaggaaaatatgccgtacagcttactaaaaaagactatgcagcctatgactacatccttggcatggacaaatggaacttaaaaaatatgcttcgcattctgggcaaagaccctgacaaaaaagtagcccttcttctagattattcctccagccccagggatattgcggacccttggtacacggggaattttgacgttacttatgaagatattgtagaaggatgcgaagcttttcttgcatatttggaaaaagagggtaaaataaaaagaaaaggtcaacggcaaagggggaagagacaatgattcatgaaaaaatcaccattgagcccaagggatgtcctcaggcccagctttacacctatttctgggaggagtccaaggaattgtatcctggacagacgcgtccggtaatacttatctgccctgggggcgggtattccatgacttccgacagagaagcagaagcggtagccataaaatttatgtccatgggctaccatactgcagttctgcggtacagtgtctatccggctcattatcccattcagcttctgcagcttgcacagagcgtacagctgctcagaaacaatgcagataaatggttcattgatcaggacaagattattgtcatgggattttctgcaggaggacatctggctgcgtccctgggggttctttggaaaagagaggagctttataagcccttccaggctggacctgaagccattcggcccgatggaatgatcctgtgctatccggtgatctcttcaggcccagcagggcacagcgagagcttccggaactttctgggaaaacggtatgacgagcttatggacgtggtttccgtggaaaaacaagtagatacagatacgcctcccgcctttttatggcactcctacgcagatgacacagtgccagtggaaaattctctgctttttgtcagtgccatgaggaaagcgaaagttcctgtggaattccatatgtattcagaggggatccacggaaccggccttgccagcgagctcacggcaaatcctgatggaagaggaattgaaagagcctgtgagagctggacctctctggcggaaaactggctgaaccgttattacccatggtggagatcacaatagccaagcggactccctgtgcatattctaatcataaaaggatatggagggagttattgagttggcagataggataattttagatgccgggcacgggggtacggatccaggtgctgtgcatgagggaaggcaggagaaggatgataccttaaggcttactttggctgttgggaaaatattacaggaaaatggtgtggatgtgatctacaccaggacggaggatatttatcagacgccctttgaaaaagccaggattggaaatgagtctggtgcagattacttcatttctttccacagaaattccagccctcagcccaaccagtattctggtgtggaagtgctggtgtatgacaaaaacggacaaaagctggatatggcgcaaaacattgagggcgctttaggtgaagtgggatttaaggagctgggggtaaaagagcgcccaggacttgtagttttacggaaaaccaagatgccggcaatcttaattgaggtaggttttattaatacagaagaggacaatgcgctttttgatgatcgattccaggaaattgccaacgccatcgcaaatgcgatactgggaaccctggaggaaacagagatttccggcggacccttatattacagggtacaggttggggctttcagggaccggaaaaatgcagaccgaatgctgtaccagctccaggagcaggattatcccgcttttctcatttacgaggacggattttataaggtgcaggtgggagccttccaaaatatcagcaatgcagttgctatggaacggcgtctgagggaagacggttatcccacgctcattgtgacttaagaagaagaaggtcactctatttttacaaatagagtggcttttctttattaaatcagctaaaatagaagcaggacacaaaagtatgatacagggtcgtttacataaatttgaaaaattatagaaacaggagagctttaaaagtatgtacgaagattttttgttacagatcacgaattttctattcatagaggacaagccacaaaaggcagacattatttttatccctggaaaccgatatcctcaaaacgcagagctggcagcacaattatataagaagggatatgccagataccttcttcccagcggaaaatacagcatctctgcaggtgaattttcggggagcacacataagcaggagcaatatcccggcccctatgagacagagtgggaatttttaaaagatgtgctggttaaaaatggtgtacctcaggaggcggtcttaatagaggaccaggctacctatacttatgaaaacgccatttactccaggcaggctgcagacagggcaggactgaaaatagaaaaagccattctctgctgtaaaaattttcatgccaggcgctgtcttatgtactatcagcgtttatttccggaaacacaattttttgtatgtcctacaattattcaggggatttccagagaaaactggaacaaaactgaggagggagtccaggcagtcactggggaggtcacccggatcattcagcagttttctctcatgatggacaaataaaagtcaggggaaagaagtttaatcttctttcccctgactgtcttcctgctcgggaagatacatatgcactttttcaatccgatttttttccagcttttccacaaccagatggatcccattgtccagtgtcaccgattgtccctgaacgggaaggctgtccagctgttcaatgatatatcctccgatggaatcataatcctctgaggtgagcgccagattcagcatttcattaatatcatccagctttgcggagcccaggactaaatattcccttccaggaatgatctccttgagatcttcttcctcatcctcatcgtattcgtcacggatctctcccacgatttcttccagaagatcttccaaggtaactaagcctgccgtagaaccatattcatccagtacgatggccaggttcacagaagcttttcgcatttccagcattaagtccgcagttgccttatgttcataggtgaaataggcttcccgcaatatggagcggatggaaaaaggttccttttggggctggagaagcagatcctttacattgatgatgccgatcacattgtctgtattgtcttcatataccggatagcgggtgtggagcacatctttgaaaatttccatgagctcctcatagctgctgtccacattgacaaaggtcatgtcgatacgagggatcattacatctttggcctcagaatcaccgaaatcaaccacattatagatcatctgtttttcttcccgttcaatgaccccctcctcctggctgacgttcaccagggtgcggagctcgtgctctgtcatagagccggattttgcatcgggatcgatgtgaaggagaagcataaagcctctggccagtttatttacaatgaatacgataggggttcccaccagcataagcagataaataatgcgggcgtaggtcaaggctaatttttcggaatgaatgcttgccatggttttgggagtgatctctccaaaaattaaaatcagcagagtgagaattccggtggccagtcccacatacacatttccaaatatctgaatggtaagggtggtcatcagggaagcggcaaaattgttgacaatattattgcccaccagaacggtactgagcatttttcctgagtcggagattaccttttccaaaattttggcccgcttatttccctgttctaccaaggcatggatgcggatccggtttaccgtggtcatagctgtctctgccgaagaaaaaaatgcagataacaaaatcaaaattaacagtatcactacttttggcgcgacacctgagtccaactccttcactcctttttcttttcgcagcctgttggatgtctgagctgttttcttatttcaacgaaatcttttaactttatgagccgaggcagcctgcctcacttagtgaaaatatacatgatttttctgaaaaaagcaaggcgtgaaaaaaaactattttaggggtgtcgaaataaggaaatttgtgatataatacaaggcgattaaagatataaaatatcagtccgttgattttcgatgaaaaaaggtggaagatgtggattttagccgccttttggataatttataatagattccgcattaagattgcgaatacatatttgtataaatcagagtataattaatagattttgggagcgaatttacagatcaaataatgatcttttctatatatttcgaggtgtaaatagaatgaaaaaaatgaacagagtatatcgtaaaaatatcagcaagttgttggccggagcagcagctctttgttttgtgctcgcaaatactggagcaagcacgatcttagcagaaaatacaggcgttgaatccgcagagggcctggccccaggttcaattaccatagaggaacccatagctttaagtgagatcactttaccggagagcagctatgggactttttcgtgggcagagggggattatgtaccccagtcttcccaggaatactgcccggtgatctttactccctacgatgtgcaggcttatgccggcgcagaaggctttgacccggacagcggcaccattactctttacgttgagatctgcgtgctgaatgtccaggatgaggatgaatttacacaggaggaaggcacacaggaagaaggcacacaagggccttctgatacggatagtgaggaacttcccaaagaagaggtatcttcccaggaccagaaggatgctggggatggggaaggtctgcttcaggttggagaagtcactcccacaggcgtaccccaggagggagaagtgacgcctacagacgtaccccaggaagaagagggggcctctacggatgtaccccaagaggagggcgtaactcctgcaccttcccaggaacctgagctaagtcctaaccctgaggtgacacaagttcctgaggtatcaccggaaggagcacctgggacagaggagtctccggagggagatgcccaggacgtgatccccggggaagaggagacccagcagtctcaggagacatcacagagtgagctgtccttagaggaacagcaggctatagccgctcagaatcatacctgccagggaattaccgtaaccggcgactatcttccttggtatgtgcagttccttgtttccagcggagaggaatatagctttggcaatgctgaggacgctaattttttccagtcctatgagtttgaattgtgggatacgttgaatgatacagaatataaaattcctgacggtcagtatgtggtggtgacggttcctgtactggaggggtataactatgtcattgagcatcttcttgacaatggggcagtggagaccatcattccctgtgtgaacggaaatacgatgatttttgccacccattccttcagcccctttggaatcgcaggaagcaagcctttggtaggctctgacattgcggagaacggatattcccagggagatgacacacagacctcgggttcagaggccaagtctgaccctgcagcgaccactgttcccaaggctccggcaaccggcactcctgaagataattcggacagccagtctcaggaaagccaggtgcagacccaggcacctgcagagacccagcaggcttcgtcagaacaggcacaggtaagcacacagccacaggcaaattcccagcaggcagtaaatacaggagataatacaaaaattcttcctctggtgatccttctggcagcggccattgtgataatcggagctgtcttggtggtgttaaagaagaaaaaataaatgaaacagtcatatccggtacaacccttccatatatttcattatgggagggttgctttatgaaagggaaagctattttaaaatctttattattttcttatgtgatcaccggtgtctttcttatgctcctggcgtttctgctgtttaaatttaatctgggagaagggccggtctcggcggggatcatagctgtgtatgtgatctcctgtctggtgggaggctttctggctggaaagtccatacgcaagcagaagtttttatggggacttttggtgggtgcctgttactttctgctgttggttgtggtttcctttttggtggagagaaaatgggatatgacatttacccatacgctgacaaccttgcttatgtgtctgggaggcggtacgctgggaggaatgctgtcataaaacaggcacaaaaaggcagtcatttgataaaaaaagttttgaaaaatagaaaggactatgatatactacaggatagacatattttactacatagggaggatatatcatggaacatatcaaaacattaaatacaaagaatttacagaacactgtaaagaagggcggctgcggagagtgccagacatcctgtcagtcagcatgcaaaacatcctgtacagtaggaaaccagagctgcgaacacaaataagagtagctgttataaggaaagataagcagcggggtcaaatccgctgcttaattcttgttacataggaaagttctcggaactttcctatgtaacaagaatcctcaaggtgatgcaaaaaagctgcttcgcagctgcacattggcgcacaaagctgccaagcccctcaagagtgaggggatggggagttgaagcgggcttgcccgctttgttttacaggaaaggatatagggaaaaccatgagtttgattcatcgttaccgcagcaatggctacaacattgttttggatattaacagcggctgcatccatctggtggatgaggttacttaccaggttttgggacttttggatgagggactggaaccggctgaggttctggacaggctgtccgggcagttcaccagggatgagatccagacctcactttcagaatgcagaagtttggaagaggaggggatgctgtttaccaaggacatttatgaacatgccattgaagaatttacggcaaaccgtcagaccgtagtgaaagctctgtgtctgcatattgcccatgactgtaatttggcctgccgctactgttttgcagaggaaggcgagtaccatggacgaagggcaatgatgtcctttgaggtgggaaagaaggccttggattttctcatcgccaactccggctccagaagaaacctggaggtggatttcttcggaggagagcctttgatgaactggcaggtggtgaaggagctggttgcctatggaaggcagcaggagaagattcataataagaattttcgttttaccctcactacaaacggagtgcttctgaatgatgagataatggaattttgtaataaagaaatggcaaatgtggttctcagtatcgacggcagaaaagaagtaaatgaccgcatgaggcccttccgcaagggggctggaagctatgatctgatcgtgcccaaattccagaaatttgcccgttccagaaatcaggagaagtattatgtgcggggaaccttcacccatcacaaccttgatttttccaaggacgtgctgcatctggctgacctgggctttgaacagatttccgtggagcctgtggtggcgccggaggatacggactatgccattaaaagagaggatattcctgtgatcttacaggagtatgacattctggcaaaagaaatgattgccagggaaaaagccggaaacggatttaactttttccattttatgattgatctgacaggcggcccctgtgtgtacaagcgcctttccgggtgcggctcaggaaccgaatatctggcagtgactccctggggggacttgtatccctgccatcagtttgtgggagaagagaatttccttatgggaaatgtttatgatggaatcacgaaaccggagatcaaacaagaatttgccggctgtaatgtatataccaaggaggcctgtaaggactgctttgcaaggttttactgcagcggaggatgcgcggcaaatgcttacaattttcagggtgacgtgaagggctgttatgaaattggttgtcagctccagaggaagcgtgtggagtgcgccattatgataaaagccgctctggctcaatagccggcagcagaaattaagaaaagttagaagggaaagaacaatgaagaaaaacaaaggaattgtggtgcttttgctgaccgtcatccttactgcttttttctgttacacagcagcagtaggaatcggtcccacaggtaccggtgccgcaaagcacatcaacacaggccttgacctggccggcggtgtgagcatcacctatcaggccaagaacagcaacccaagcagcgaagatatgtcagataccatctacaagctgcagaaacgtgtggaacagtatagtaccgaggctcaggtttaccaggaaggcggcaaccgcattaacgtggaaattccaggtgtgaccgatgccaacgccattttgcaggacttaggaaaacctggttctctgtgtttcatagtggaaaaggacgaggagggcaactccaacttctcctatggccagaatggctatcagcttgacagaagcctggatgagatccgagaagccggctctgtggtactagaaggtaccgatgtggcaaacgccgagggcggcgccatccagaactccaccaccaaaaatacagaatatgcagtaagcctgacacttacggaagagggcaagaagaaatttgctgacgcaacctcagcaaacgtaggaaagcccatcgccattgtatatgataacagcattatcagcgctcccaatgtaagggaggctatcacaggcggacaggcccagattgacggtcagtccagtgtagaggaagcaaaagaactggcatcatatatccggatcggttctctgagtctggagctggaagagctgcgctccaatgtggtagctgctcagctgggtgaagaggccatcgctacctccctgaaagcagccgccatcggtttggttcttgtgatcctgtttatgatcctggcttacagaatccccggtctggttgcaggtctggcccttattatttacacagccctgatgctgctcaccctgaatgcttttgacattaccctgacccttcccggtattgcaggtattatcctgggaatcggtatggcagtggatgccaacgtaattatttatgcacgtatacaggaagagatcgcagcgggggttacggtgaaaaatgccatccgcagcggattccagaaagcattctctgcaatctttgacggaaatatcacaaccctcatcgctgcctttgtgctgatgtggctgggctccggctctgtaaagggctttgcttatactctggccctgggtattgtgatttctatgtttaccgcactggtagtatccaagctcattgtaaatgctctgtacgcggtgggtgtgagagatgagaaattctacggaaaagcgaaacagagaaaaatcatcaatttccttggaaagaagaaaatcttctttatcctttccgcagtacttgtgatcagtgctcctgttaccatgttcatcaacagcagcagaggcagcaaggctttgaactacagcctggaattttccggtggtacttctacaaatgtaaccttcaatgaagacatggacattaaagagatcgactccaaggttacaccggttgtggaagaagttaccggggacagcaatgtacagcccacaaaggttatgggaagcaatcaggttatcattaagacccgtaccctgaatgtggaagaacgtgaagctcttaatcaggctctggtggataactttggcgtagacgaaagtactatttccacagagagcatttcctccaccatcagttcggagatgagaaaagatgcagtggtggcagtgatcgtagcaaccattctgatgctgctttatatctggttccggtttaaggatatccgttttgcaggcagtgcagttctggctctgctccatgatgtgcttgtggttctggctttctatgccattgccagagtatccgtgggaaatacctttattgcatgtatgctgaccattgtaggttattccatcaatgcaactatcgttatttttgaccgtatccgtgagaatctccacggaagcaagcgtatcgaccagctggaagaggtggtaaaccagagtatcacccagacactcacaagaagtatttatacttctctgactacctttatcatggtattcctgctgtacatcatgggtgtatcttccatccgtgaatttgcagcaccgctgatggtaggtattctgtgcggcgcttattcttccgtatgtattacaggagctctgtggttcgtgatgaaaaagtcagctgccaagagagaaacccctgttcccgttgctgtgcggtcagccgccaagacagctgcaccgaaagctgagaagactggagcagaaaaggttcagacaaacacagcacctaagaatacttctgaccagccgaaaaagaaaaaccgtaagagagtccaggagcgtctcgccagagaaaacgggacagtccaggaacagaacaaagaagaataaaccttcataaacatccctgataaaaaaggggatacaagaacgaggatgatgcatggcacatcctcgttcttgtattctttagagaatctgttaaaatggataatatgcggaagaaaacgaaaaatgaaaacgaacaaaggagaatacaatggaacgttgggtagtttcggctaaacgggcggactttcaggaaattgcacggcagttttccatagacccggtggtggcacgactgatacgaaaccgggatgtgatcggagacaaggcgattcaggaatatttaaacggtaccatggaggatctgcctagtcctctgctcatgaaagggattgcagaggctgtggaaatcctgcagaaaaaaataagccacaagaaaaatatccggattatcggagactatgacattgacggtgtgacggccacatatattcttctcacaggcatgaagcggctgggagcctgtgtggacacctacatacctgaccgggtggcggacggttacggtatccacgagcccctgatctatcgggcgcaggaggatcagatcgacaccattctcacctgtgacaatgggattgcagcccaggcagaaatagccctggcaaagagtctgggtatgactgtgattgttacagaccaccatgagattccctatgaggatactgcccaaggccgggaataccgtcttcccaaggcagatgtggtggtgaatccccaccagccggactgcccttatcccaacaaaaatctgtgtggtgcggtggtggcctataagctcattcaggctctctatgaacagtatgggattcccaaggcagaattaggcgaccttctggaatttgcagccattgccacagtgggggacgtgatggatcttcagggcgagaaccggatcttagtgaaggaaggactaaagaggattccctttacttctaatttaggactggcagaactgatccgtgccaaccatttggaggacaaggcgatctctgcctatcacattggatttgtgctgggcccctgtatcaacgcaagcggaaggctggatacggcagccagatctctggctcttttccaggcagagacccggcaggaggcagccagactggcaggcgacctggtggacatgaatgcaagccgcaaagctcttacagaacaggggcgggaagcagcggtggagatggttgagaccacctctttgaaggaggacagagttctggtgatctaccttccccagtgccacgagagcctggcaggcatcattgccggaagaatccgggaaaagtacaataaacctactttcgtgctcacaaagggggaaaatggggtgaaaggcagcggccggtccattgaagcatactctatgtatgaagcactggtggaatgtgacgacctgctggtgcagtacgggggacatcccatggccgcaggtctttccatggaggaggccaatgtgccccggctgcgcaaaagactcaatgagctgtgccgtcttacccaggaggagctttgtcccaaggtggtcattgatgtggcaatgcctttttcctatattaccagaaccttgatcacacagctggagctgctggagccttttggaaagggaaatacaaaaccggtttttgcccagaagggaattcaggtattaaatcctaaggtttttgggcagaatcgaaatgtggtaaagatgcagcttgtggacccggaaggcttttccatggatggagtgtacttcggggaggccggccaatttatggagcggatcgcccagggaactcctgtgagtattacctattatccgggcatcaaccgttatatgggaagggaaaatgtacagattgtggtccagaactatctctaaagcctgtaatcttgcggtttttcattgattctaagaaaaaaaaatgctatactaacccatatattagaatccatattacgacaaaatctgttcctgtacctgtgtgaccagtggacaggaggcaaaattgctgctgggcatgtagtgtatagatatacgaaatcttttttcgtgtatatcagaagacgtcaaacaggaaagcggaggaataaaaaatgaaaaagatagaagagtacgtgagaagtattccggattttccggagccgggcattatattccgggatgtcacaagtatattgcaggatgcggacggattgcagctcgccattgactccatgcaggaatgtttgaagggtgtagatgtggatgtgatcgtgggaacggagtcccgcggttttattttcggggtccccgtggcttataatcttcacaagccctttgtgccggtgagaaaggcagggaagcttccctgtgaagtgatctctgagagctacgatctggaatacggcagcgccaccattgagattcataaggatgccatccagccagggcagaaggtggcgatcatcgatgatctcatcgccacaggcggcaccattgaggctgcagccaagctggtggaggaactgggcggccaggtagtgaagattgtgtttcttatggaattggcaggattaaagggaagggagaagcttaagaactacgatgtggcttctgtaataacctatgaaggaaaataaattaaaacattgacggcaggcaggtgagaattgtggatcagaccaatataagtgtagagcaggaagaaaagaaaaaggaacggttggaaactgtaaaaaaggcagatgctgcagtgaaaagtatgcatgattttaccagcccggaagaactgtatcaggaattagtcaccagcgtgagaaagtaccatccgtctactgatatttccatgattcaaaaggcttacgaagtggcaaaggaagcccataaggaccagaagcggaagtccggtgagccttacatcatccaccccctgtgcgtggccattattcttgcagatttggagctggataaggaaaccattgtggccggacttctccatgatgcggtggaggatacctggatgacctatgaggaggtctccaaggagtttgggcaggaagtggccgacctggtggacggagttacaaagatcggaaagttgtcctattccaaggacaaagtagaggtgcaggcagagagtctgcggaaaatgttcctggctatggccaaggatatccgggtgatcttgatcaagctggcggaccgtctgcacaatatgcggacacttcagtacatgaggccggagaagcagcaggaaaaagcaagggagaccatggacatctatgcccccattgccatgcgcctgggtatatcaaagatcaaggtagagctggatgacctttcgctgaagtatctgaaaccagatgtctattatgacctggtggaaaaggtggccctgcggaaaagcgtccgtgaggaattcgtaggaaatattgtaaagctggtgcagaagcacatggacgatgcaggcattcaggctcaggtggacggccgtgtgaagcatttctttagtatttataagaagatggtgaatcaggataagaccattgatcagatttatgatctgtttgcagtgcggatactggtggacactgtaaaggactgctacgcagccctgggtgtgatccatgaaatgtataagcccataccgggacgttttaaggattacattgcaatgcccaagcagaacatgtaccagtccctgcatactaccttgatcggaccaaacggtcagccctttgaaatacagatccgaacctacgagatgcataagactgcggagtatggtatcgcagcccactggaaatacaaagaatcctccgatggcaagaagacggtaggccagagcgaggaagagaagctgaactggctccgccagattttggaatggcagcgggatatgtccgataaccgggaattcatgagtctgttgaaaaatgacctggatttgtttaaggacaatgtttattgcttcacaccccagggtgatgttaagactctgccaaatggctccactcccatagattttgcctactgtgtccacagtgcagtgggaaataaaatggtgggagccagagtaaacggaaagctggtgcccattgaatatgtgattaagaatggggatcgtattgaaatcattacttcccagaattcacctggacccagccgggattggctgaagatcgtaaaaagcacccaggcgaaaaataagatcaatcaatggtttaaaaaggaactaaaggaagacaatatcctgaagggaaaagatatgctgaaccagtacgccaaggtaaaggggtacaagatcagcaattataccaaaacccagtatctggaagcagttatgcgaaagtatggcttccgggattgggaatctgttctggcagccattggccacggaggcctgaaagagggccaggtgttcaacaagctggtggaggcctatgataaggagcataaaaaggccctcacagatgagcaggtactggaggcagccaccggtaatcaggaaaagctccacctggcaaagagtaagaatggaattgtagtaaaaggcatccacgatgtggctgtgcgattttcaaaatgctgcacgcccattccgggagatgagattattggttttgtcaccagagggcgggggatcaccattcaccgcacggactgtgtaaatatattaaatatgtctgagatggaccgctcccgtctcatagaggctgaatggcaggagccagagaaagcggcggagaagtatattgcagagatcagtgtctatgccaacaaccgtaccggtcttctggtggatctgtccaagatttttacagagcgcaaaattgatgtgcgcagtttgaacagccgtaccaataagcaggaaaaggctaccattgccctgagctttgagatcagcagcaaggaagagctgaacagtctggtagagaagctgcggcaggtggaaagcgtactggatgtggagcggaccagaggttaaggagagactatgagcaaattagaattacagaaatgcatactgggaatggtggctaccaactgctacttccttatgaataaggagaccaaagagctgctgatcgtggatccggcagatgaggcccaggcaatttttgccaaggctgatcagatgggaggaacccctgtgggaatccttcttacccacggccattatgaccacatcatggctgtggaccaggtaagagaaaaatatgggattcccgtatatgcttccagggaggagcaggatatgcttgcagattcccagatgaatcttacagcttaccagggcagaagtacgtctgtaaggccagagtatatgctggaggatctggagatttttcaggcagcgggcttttctattcaaatgatccacacaccaggccataccaagggaagctgctgttattatctgaaggaagagggaattttgttaagcggggacaccttgttctacggctctgtgggccgtacagatctgcctacaggaagtacggcagccattgtgacaagtcttcaccgcctgctggagctgcttcctgaggacacagaggtatttcccggacatgacgcatctaccaccataggatatgaaaagaggtacaatccctttgtgtgagaatataaagattttttacgaaagcagagaatttgaacatgatatttatgctttggtgaaggctttttaccccggcgcacaggtacagtcacaggactgggaacctgagaaggagccgggggctggtaagacaaaagagcttctgaaggaatgggatctgctcctgtatgtgtatgaggacggcagattccaactgcagggagggaacggcgctgccgcttcccagaccatagagggagttgagagcaaggaagggcggtctgaaaacacgaagatggcccttatttcctgcaaggaagggtctctcaccagaaaagaaagaaaagaccggatcaagcagaatctgtatatgcttctgtccaggaaaacccaaaagaagctgccgtggggaaatcttacaggaatacgccctactaagctggcaatgggaatgcttgaggagggcatgaaaaatacagagatcgcccagtatatgcgggatgtgtattatgtcagcccccagaagacagcccttgccatcaccattgccaaccgggagagggagatcttaaaggacattgattatgagaacggctacagtttgtatgtgggaattcctttttgccccagtatctgcctgtattgttccttcagctcctatcccttaaagcagtgggaaaaacgagtggatgaatatctggcagccctggaaaaagagatttttgcagttgctggtattatgagggaaaaaggaagaaagctggatacgatctatattgggggagggacacccaccagtctgacggcagaccagcttcgcaggcttcttgtctgtctgggtcaggcctacggctttgagggactgaaggagtttaccgtggaggcgggacggccggacagcattacaagggataagctggaggcgttgagagaatttccggtgacgcggatctctgtaaatcctcagaccatgaaccaagaaaccctggaactgatcggcaggcgccacaccgttgaggagacaaagcaggcttttgtcatggcaagagaggcaggctttgacaacattaacatggacctgatcgtagggctgcctggagaggggaaagagatggtccgcagaacgctggaggacatccatgctttggagccggacagccttaccattcattctctggctgtgaagcgtgcggccagactgaatatcttccgtgaccaatataaggagatgacctttgagaacagtcaggagatcatggatatggccatgacctgtgcttatgaaatggaaatgggtccctattatctgtaccgccagaaaaatatggcgggaaactttgagaatgtgggctacgcaaaggttgacaaagcgggaatttacaatatactaattatggaagaaaaacagcccatcattgctttaggggccggcggctcctcaaagctggtgtttgaccatgggcagcgcattgagcgggtggaaaatgtaaaggatgtttccaattacattgcccgcattgacgagatgatagagcggaagcgcacaggcatcacaacatatttataggaggtggattctggtggcagaggcggaaaatgagctggcctatacatcggagggcaatcggattttgtcctacgatctatccagcgaactgaaccatggaatccgggtgagcaatctggcctatgcagttgccatggagctggatctggaggaagaggaatgttatcaactggccattgccggtatgcttcacgatattgggaagttaaagctcactgggtatatcaatggcgaggaggaggatcctctggtgatcgaagagctgaagtatgtgcggatgcattctaccatgggttacgaggagcttaagggacagggatattcagactttgttctggagagcattctgtatcaccatgaaaactatgatggaagcggctatccttccaacctggcaggtgagaagatccccataggcgcccggatcctgcgtgtttgtgacgtgtttgcggcattgacctctgaccgtccttaccggaaggcctttgatatggagatggcggtggagctgatgatcgatgaagtaaaaaactttgatatgcaggtgttccttgcatttctcagagtggtacataaaaatgaggaggaagattatggcattaaagaagaagcctgtgacgggcatgaaggacattttaccaaaggagatggaaatccgggatcacgtaatgaatatgatccgtgagacctacggaacctttggattttcttccattgagaccccctgtgtggagcatattgagaatctttgcagcaagcagggcggagaaaacgaaaaactgattttcaaaattctgaaacgaggagagaagctgaagctggaccaggccagggaagaggcggatctggtggattcgggcctgcgttatgacctgacagttcccctatccagatactattccaacaatgccaatgacctgccggcaccttttaaggcgcttcagatgggcaatgtgtggagagcggaccgtccccagagaggacgtttccgccaattcatgcagtgtgacattgatattttaggtgagcccacttatctggcggagattgagctggttttggccaccaccaccttgctgggcaaactggatttccacaatttcaccatccgcatcaatgacaggaagattctgaaggccatggcccagtacagcggttttccaaaggagagctttgataccgtatttattattctggacaagatggataagatcggcctggagggagtagcccaggagctggagaaggaaggcttctccaaggaatccattgctgcctacctgggaatgttccaggagatcactcctgacgttgagggcgtgcgctattgtaaagaaaagctgaaagatgtgctggagcccagtgtagcccaggatctggaaaccatcatctccactgtggaggctgtgaagactgctgactttaagatggcctttgacccaactctggtgagaggaatgtcctattacacaggccccatctttgagatcagcatggacgagttcggaggctctgtgggaggcggcggacgctacgatgagatgatcggtaaatttaccggcaatgatacaagcgcctgcggtttttccatcggctttgagaggattgtcatgctgcttctggagagaggttatgagattccaggggaagcccagaaaaaggcatatttaattgaaaagaatatgccggcagagaagctgaaagaaattataacccaggcaacccaggaaagaagccagggagtccaggtaaatctttctattatgaagaaaaataagaaattccagaaggagcagctggaaaaagagggatacacagaatttgtggaattttttagagataaaatataagaagtgctgttgaacagcgatacagattaagaggagaaaagaaatggctgaaagtatgcaaggtctgcacagaacatgccgatgtgcagaagtgacaaaagacatgatcggcaaggagatcacccttatgggctgggtacagaaggcccggaataaaggcggaattgtatttgtagatttacgggaccgttctggtatcatgcagctcatttttgaaaatggaagcattgatgaagagggttttgagaaggcaggaaaattaagaagtgaattcgtcattgcagtcaacggcgtggtggagaaacgaggcggggcagtcaatgagaatctggctaccggagatatggaaatgcgggtaaagtccatgcgtgttctggctgagtccgacgtaccgcccttccctattgaagaaaacagtaagacaaaagatgaggtgcgtttaaagtaccgatatctggatctgagaagaccggaccttcagagaaaccttatgctcagaagcagagttgccatgctcaccagacagttttttgcaaaagaagggtttttggaaattgagactcctacactgatcaagagtactcccgagggagccagggactatctggtgcccagccgtgtgcatccgggaagcttctatgcccttccacagtctccccagatttttaagcagcttcttatgtgctctggctatgaccgttatatccagcttgccagatgctacagggatgaggatcttcgtgcagaccgccagccagaatttactcagatcgacatggagctgtcctttgtggatgtggacgatgtcattgatgtaaatgaaagattcctggccttccttttcaaggaggttctggacgtggaggtaccccttcccattcagagaatcacctggcaggaagcaatggatcgatttgggtccgataaaccggatttgagatttggaatggagcttcatgatgtgagtgcccttgtgaaaaactgtggtttcagtgtatttaccacagctctggaaaacggaggcagtgtccgtggaatcaatgcaaaggaacaaggttccatgcccagaaagaagattgacaaattggtggactttgccaagacttacggagcgaaaggtctggcctatattgccattggagaagacggaaccaggaaatcttcttttgcaaagttcatgacagaggaagagatggatgccctcattgaggctttagagggagagaagggtgatttacttctttttgctgctgacaaaaataaagtggtctatgatgtattgggagcccttcgtctggagctggccaaacagatggacctgctggataaaaatgagtaccgttttgtatggatcacggagttcccccttctggagtggaacgaggaggaaaaccgctatacagccatgcaccatccgttcaccatgcttatggatgaggacctgcccttgctggatacagatccgggcaaggtccgtgcaaaggcctacgatattgttctcaacggaaacgagatcggcggcggaagcgtgcgtatccatcagaaccatattcaggagagaatgttcaaggaattgggctttagtaaagaggctgcttatgagcagttcggctatctgctcaatgcctttaagtatggtgttccacctcatgcaggactggcttatggactggaccgtttggtaatgctcatggctaagacagacagtatccgtgaagttatcgccttcccgaaggtgaaggatgcctcctgtcccatgtcagaggcacccagccaggtgagccaggagcagctggaggagctgggactttgcgtggaacaagaagagaatgaaaactaaaggagcatagaagatggagctgactgttaccacctttttgatcgtatgtcctttggtatttcttgccagctttgtggatgccattgcagggggaggagggctgatcgccctccccgcctatctgctggcgggagtgcccatgcacaatgccattgccaccaacaagctgtcatctgccagcggcacggtattctccacctggaggctgtgcaaaaataaatttgtcaactggcatttggctttcccctgtatttccatggcccttctgggctcctacataggggccaggctggctctccttgccagcgacagattcctgaagttccttctgatcccggttctgcccattgtggccttttatgtgttgcgaaaaaaagatctgggggatgaggaaactccggagagcatttctgcaaagaaacagtggctcattgtggcagcttcctccctggtgatcggctgttacgacggcttttacggcccaggtacaggtacctttctccttttgctgtacacaggacttggaaaaatggatgtgcgcagggcagcaggaaatgtaaagctggcgaatctgtcctccaatgtggctgcgctggtggtctttctctttagcgggaagattgtattcagcttaggactggccgcagcggtattttccattgggggccattatgtgggttcaggcatggtgatgaagaacggaagcaagattgtccgtcccattatcctgctggtgatccttttgttgtttgtgaaaattattgctgatctttaaaagcggaaattcccggccggtttctggccgggtaaaattttgtcgaagggttctggttgccaggccctgtttttttatgttatcataagactgtccaaaatttgaaatgatctgcgcagatacattcattcaggcgattccgccgttaatacccacaaattattatgtgtcagatggcatcggattaaagatagccattatataaaaggagaattttatggaatattatgaatatggcaatcaagagattacgaaggaactttctgtgccctcaccggaatatctccacaactggctggagatcgcaatgggaaaggtatttccggagctgagtgacggtcctgtgtttcaggagatttttgatcctgtccgtcattatggacgcatacaggagctttacaggctgatcttcgcctcagtgatcaagccttttcccacattggtcagagcggtgcctcaggcagagatcagctggggagagacaggggaagaaatccggaaaaggctggaaggtaagaaaggagggaatccctgtatgggggaggtgatcagtaaggccatggcacagctgaagctgtccagtgctgacctgatcctggattttacagtgcgggggactgatattgaaacaggacctgtccattttatggcacttttgtgtaaaaagacccttttttctgattcttctttacgggcggtgaggtatctgcgacccatgaaggatacaccggaatttctctcctgtcctgtatgcctggcttatattaatctggagaagtgtgaaaaacactggaaagagaagaactatccccggggaaaagagaagctgtatgcctggatgacctttattggaaatgtgaacggcccccaggcgagaagaatcgtgaaggaggaaggagagatggcacagatctgtcaggagctgcgccggtacgggaggatccaggggcagaagattgccaggagtctgggcgttccggagctgagccaggctcgaggtataaaagaagacagtgaagtacgttattgagtacttaactgtctcctggattattgtgtacgtattgttgcggtcattgaatcaggtctgccgtgtcatctgtgcctgccagattgtcggcaaggcttccgaacaaagctttccctaattgattgtcctccatttcgatttcccaggatgccccattgttaatgagacggatagggatcacgctggtggtggtggcggtattgcctttgatggtttccagcagaagctgatgggatttttccaggcgtttggcggaaccatcgatgactgcatctgcagaagccaggtaatcctccagcttggcctggtgagacttaaggatggattcactgtcaaaggtggtgaaggctacatctacagtggcggaataaccgtcttcctggttgtccttgatctcatagctgaagtttttgtgaatctgctccacaacagccagggccacggccttccaactggaatcgctggaattgagcaggtcgctcattcctaagtagctgcacatctggtcatcatccatattttttaaggtatccagatacacggtcacggtctcttttggagggatcaggttggggtctgacagataggtgagaagacctcctaccagctgattctccaaggatttggtccgctggatctcccattcattttcttggttttcttttaatttcatggtacagctgttttctacctttttgtaatcgttctttttaagtatctgattgagaagcaggtagtttgcctccagggagagcgcctcatcctcttttttgggagactgggcggtatttaggatttcttctctcaatctggcacgggagaaatccttagctacagagttggcgtcaatggtggagagacgtatggatgcagccgcagccttcttctcagtatccacctcaatgtccaaaatcttgtagtcaaagtccttaaagaacaaagaaaatacttcctccacttcttcagagatttctgcgtcatcggcggtgccggggaaaagctccttgtaagaaatgtatttctgggtggtctggatatccagatttttcagtaagtccagctcactgatgattgcttcctctacatctgtttttttggcgctgctgcacccgcatcctgataccgccagggcagaacaaagcagcagaggcatgagacgtttgatgatcttcatgggtatgttcctttccaaaatcttcctgttttcttagtttaccagattatataaaaaaagtcaaaattgcggctggagggagaaaaattttgcttttcagtaagatggaaatttgtgactattttgtgagttttcctccaggggttttcatttttcgcagaatctggtatgatataaaagttaaagtttaccttttaggaatgggagggacagtatgaagaaaccagtagcgatcataggggggattgtgctgacggtgggcattgccggtctgggttatgtcggctggcggtatctgagggaggatcaggccagcagcgaagataccgtatatgtgacaaccgtcagctcattgatagataccgcatcagggaatcagaaccgttttgccggggtggtggagcctcaggatacggtggagatcaagttggacagcggccggaaggtaaagtcagtgaatgtgcgtgtgggacaggaggtcaaggttggagatgtgctttttgaatatgatctgagcagtatggaagatgacctgacagaagcccagcttgaatttgaccagcttgtgaatgagcgggagagcattaaggaacagatcattacctatacaaaggagcgggacgaggcgaagaatgaccagaagctctcctataccatacagatagaaacagcaaaaatgtctctcaggaagaatgaatacagccagaagacaaaatcagcggagattgaaaagctgaaaaactccatgaaccagacagcagtcaccagtgagatcaacggtgttatcaagaaaattgatactaccaagatggacaccggggatgacagcggcggagcagatatgtacagcaattctggcagcagctcggatgccttcattaccatactcagcaccggtgcctatcgtgtgaagggcaaggtcaatgaacagaacatgcagagtattatgcagggagcgcctgtactcatacggtcccgggtggatgaaaagcagacctggaaggggaccatggggaacatcgatacagagaacagcagcaacaatgaaaacggcaataccgtgtattacggaatgggggggatggatccccagaccacctcaagcagctacaatttctatgtagacctggaatcctcagagggacttatgctgggacagcatgtatacatagagatggatcagggccaggaggaagtgaaagaaggaatctggctggatgagtactttatcgtggaccttgacagtgagccctatgtatgggggagcacaggagatgacaagctgcagaaaatttccgttactctgggcgaatatgacgaagcccttggaaaatatgagattgtagacggactcacggacaatgactgcattgcttttccggcagacaatctggaggagggcctgcacacgttgatcaatgacggcatgcagatccctcagaattcccaggaagagaatcttggtcccattgagatggatccaacggcaggcagcatggatggatccgatagtatgggaggcatggatgagatccccacagatgacggacagtccttggatgatccagacggactcaatgatatggtgcccatagaggggccggacggagaagttctggagtctgcccaggagtggacagatgaggatatgggagacatgggggaatgggaatccgtgcccatggaagaaataccttccgatgaagatctgactcccctggaaggagagggggttggctgatgtttctggaattaagtggaatttacaaggagtatgaacagggaaaaatgaaagtgcctgttttaaaggacgtgaatttttctatggaggaaggagagtatgtggccatcatgggaccttccggttccggcaagacgaccttgatgaatattatcggatgtctggataaggccactcagggcagatacctgctggatggggtggatctgggaacctgtagtgagaatgccatgtctgatatccgccttcataaaatcggatttgtatttcagagcttccatctgcttcccaggcagagtgctctgcagaatgtggaaatgcctttaaattatgccaggatccccaagaagcagagaaaggaaaaagccctgcgggctttggacagggtaggcctttccgaccgtgtggagttcagacccaatcagctatccggcggtcagatgcagcgtgttgccatagcaagagccattgtaaataatcccaagctgctgctggcagacgagcctacaggggctttggacagtaaatcaggtgctcaggtgatggagctgtttcagcgccttaacgatgaaggtgtgacagtgcttatgatcacccatgacccggatatcgctgcccatgccaagcgggtggttaccatccgcgacggcattctggcggagaagggagccgccttatgaagaaaatactaaaaagagttctggtgactgtactgatcctggctctggtgggagggggcgtgggagcggcccttgtctataccaggaagaacaaccagaaagaggttctggtgatccctgtggaaagtatttacacccaggtatatatgaatgggagcaatactctggacggtacggtgacaaccagtatctcccagaatgttaatctggatcaggacagcataattgaagaaatcttcgtgaaaccgggagatcatgtgaagcagggggacaagctgatctcctttgatatgactctccaggagatggagcagaatattaatcagctcactttgcagaattataaaaataatctgatcaaggcacagaagagacttaccagcctgcaaaacggcggtcccattgaagaaaataccgatacttcaagcgattatacttcctatgattataacgattatgggagcggtgatctgggggatgacggcatggatgatatgggagagatccggggaagcctggacaaaaaccagggaataggaaacagcggtatgcttttggctgctgcatcccatcttcctatatttgcagccttcagcgatgagaccgtggaggaaatattccaggatgattccgtggaagagcttccggaggatcctgtccagccaacaggtgtgccggatctcactccggccccgttgcccacagacattccagatgtaaccggggaaccggagcccacaggaagtccggagcctacccaggaacccactgtgacggcactgcctgatttgaccgttaccccggagcccacagaaacgcctgaggtgacagtgacgcctacggcatctgtgactttgcttccctcaggaacacccacaccgggaatttttgaggatggaatgctccaattgtataaggttctggatgataagagtgagccttataagggaacgggaacagaagaggatccttatattttcctgtgcagcgcagaagaggagatggtcattgccaagggaagcttcattaatcttatggctggatatgacaaggatggaaagaaagttgtccataagggcggatattggtaccggctggaattttacaatgatgaagatctgctcacctacgagggagaccccacggtggacgatgatctgaaatatctctgtctgggatattacttaaataacggaggccttgtggaaaagcccatgcgtgtccaggacgagatggaatacacactggaaaattccacgatcccggagcttgaagaggaaccaggagatgactggacagattggggtgacaactcagatacaactacgaccatgaccagagcccaggccatcaaggagcagcagaaggccatcgctggcctgaagctggatatccgtaagaaaagcctggaaatctccaagctggacaaaaagctccagaagcagaccgtggtcagcagcgtggacggtgtggtgaaatccgtaggagatccggacacaggagattatgagggaaacgcctttatggttattgacagtgaccagggctattatattaaaggaaatgtaagcgagatgtatctggaccagtttaaggaaggcaccctgatcaacggttattcctatgagaacggtgtttccttccaggcagaggtccgggacgtggcggactatcctgtaagcgaggacagcaattattatggaggatatggctccaacagcaatgcctcctattatgagtttatggcgtatgtgacagaccagagtgtagagcttcagagcgaccagtggatttccctcaccttccagaccgcccagtcttccgcctccaatgccctgaacattatgaaggcctttgtgagatcccaggacggccagagctttgtgtacaaagaggaaaacggtgttttgaagaaacagatcgtgacagcaggcgccagcaaggacggcggctacagtgtgccggtgaccagcggggtctccatgacagataagctggccttcccctatggcagcaatgtgaaagagggggcaaagaccagagagggcacctttgacgagctttatgaatatggcggagtatattaggaaaggggtgcttacatgttagaaaatatacgattatcatttcagggaatctggtctcataagatgcgttcctttttgacaatgctgggaattattattggaattgcttccattatttccattgtttccacaattaaagggacaagtgaacagttgaagaataaagtgatcggagcaggaaataacctggtttctgtaaagctttataacggagactctgaatatgatgtggaatacaacagctccggtacacctgtgcctgtgctcaccaaggagcagaagaaatccattatggatctggacaatgtgaaaaatgcctccttttactatggaagaatgtttgcagacagcatctatcatgaaaacgccagccttcagggaggaaagatctacggcattgataaaaattatctggataccaacggatatgtgatccaggctggcagaggttttgtacaaaaggactatgataatttcaggaaggtgacgcttctggacgaaagtgcctccacaagcctatttgacggagaaagccctcttggcagaaccatagagatcaagggagagccctttgtggtagtggggatcatcaagcaggcacaggatacccagccttctattgaatccctgtcggagtattatacctattaccagaccaccacaggtacggtactgatccccagtacaagctggccagtggtttatcagtatgacgagccggaaaatgcggtgatcaaggtgacggagacagaggccatgagtaccgtgggcaaaaaagcctcggatatcctaaaccagtatctgaatgtggccaccagtctggaaaatatccagagcatgggcagtacatcagagacagaagaagagggtaccgaggaagagagcggcaccggggaggtgacgacccgggttcagtataaggcggacgacctgctccagcgggccaagaatctgcaggaattaagtgaaagcaccaattcccagcttctatggatcgccagtatctcccttctggttggcggtatcggtgtaatgaacattatgctggtgtctgtcacagaacgtaccagtgagatcggattgaaaaaagccattggggcgagaaaaaagaccattcttcttcaattcctcacagaggcggcggtacttacaagtatcggcggagttctgggagttctgggcggtcttgtcatgtcccaggtggtgcacagggtgtcagggacacccactgcgatcagcgttccggccattgtaggctccgtggtattttccacggtcatcggattgattttcggccttctgccatctgttaaggcctccaatctgaatcctattgatgcactgcgaagcgaataaatgtaatcactaaaaaaagccgcactttgtgaaactacagagtgcggctttctgtagctgccgtaccagtatggtttgaaaaaatcataggtacggcagttttttcatttctatggtcctgtaggatgatggtacttgaaaaattccgcactttatacagatggttttttggaatttctcccccaaagactctggaagaaatataaaattcctacataatgtatgatgaaaacttgaaataggcaaaaatgcacaaaaaaacaatagtaaatttgtttaaaacatttccaaaaaaaggttggaattccccggaacccgtgttagaatagacccataatgacaaaaaaataacatacttgtcaaaaaagtaacatcttttattggtagaacccagcaagaagaatggaggaaaaaatttatgcctgatggaaagaccacagtggcctttgccggaacacaggagcagaaggaagctcttatgggcgtgatccgggagaaaaaggaacagaagggcgcactgatgcccatactgcaggaggctcagaatatttatggctatctgcccaaggaagtactgaagatgatctctgatgaaacgggaattcccatggaaaagatctatggggtggcaaccttctattcccagttttctttaaaccccaaaggaaaataccgtatctctgtctgtcttggaaccgcctgttatgtaaaaggctccggggacatttacaataagcttatggaaaaattgggaatcgtgggaggcgagtgcacgccggacggaaaattctctctggatgcctgccgctgtgtgggcgcctgcggacttgctccggttatgctcatcaacgatgaggtatacggacgtctcacagtggatgatattgacgatatcctggcaaagtatgaatagaaagggaggacaccatgataacactggagcagttaaatgaaatccgtgaccagcacaaagatgtgctggacattcgaaaaaataaagcccaccagatactggcaacccacaacggagaggtagccggagggaaaaaggtagtgctggtgtgcggaggtaccggatgtacctcctccggaagcagaaaagttatcgacaaactaaaagaggaggtaaaacgccaggagctggaggagcaggtggaggttgttatgaccggatgctttggcctgtgtgctctggggccgattatgatcgtgtacccggagggcgctttttattccagagtgacagaagaggaaattcccgagattgtggaggagcatctgaaaaaaggcaacctggatgtaaaatatctctacagtgagacggtaaaggggaatttggtgctgccccttcaggatactcccttttataaaaaacagaaaagggtggccctgcgcaactgtggcaggatcaacccggaaaatatcaatgagtacattggtactggcggctatcaggccctggctaaggtattgggagagatgacacctcaggatgtgatcgatgtgatcacccagagcggcttaaggggcagaggcggcgccggcttccccacgggaagaaagtggcagtttgccaaagccaatgaggcagaccagaaatatgtgtgctgcaatgcagacgagggcgacccaggtgccttcatggaccgctccgtgctggagggagatccccatgtggttctggaggccatggccatcgccggttatgccattggctccaatcagggatatatctatgtgcgtgcggaatatcccattgctgtggagcgtctgaatattgccatagctcaggccagagagtacggtcttctggggaaacatattttcggaacagattttgactttgatatagaactgcgtttaggtgcaggggcctttgtatgcggggaagaaaccgcactgatgacctccattgagggcaaccggggcgagccccgtccccgtcccccattcccggcagtgaagggactttttgaaaagcccactattttgaacaatgtggagacatgggcaaatgtgcccaggattattttaaagggagcccagtggtttgcctccacgggaacagagacctccaagggcacaaaggtgtttgctctgggcggaaaaatccacaacacaggtctggtggaggttcccatgggcacctctctgcgggagatcgtggaggagatcggcgggggaatcccggacgggaaaaaattcaaggctgcccagacaggagggccctccgggggctgtatcccggcagagcatatggatgtgcccattgattatgagcatttgatggagatcggttccatgatgggttctggcgggctgatcgtcatggacgagactacctgtatggtggacatcgccaagtttttcctgaactttacggtggatgagtcctgcggcaaatgtgtgccctgccgtatgggaaccaagcgtctgttggaaatgctggagaagatcacttctggaaacgcacagatggaggatttggacaagctggaggagctgtgctattatattaaagacaatgcgctgtgcgctctgggacagacggctcccaacccagtgctgtccacccttcgttacttcaaagaagaatatattgcccacattgtagacaagaaatgtccggcgggagtatgcaaggagctgctcacttaccggatcgatccagataaatgtaagggctgtaccttatgtgcccgtacctgtcccaacgatgcgatcaccggaaaggtgaaggaaccccacgtgatcgatcccaacaagtgtgtgaagtgcggtgcatgtatggaaaaatgccggtttggcgcaatttataaagagtgatggaggcttaccatggaaaagatcagcttaaaaataaatggaatgacagtggaagcccctgggggctccacaattttagaggcggcccatctggccagtgtgaagatcccaaccttgtgctatttaaaggatattaacgagatcggcgcctgccggatgtgcgtggtggaagtgaaaggcgcccgctccctggtggctgcctgtatgtatccggtgaatgaaggcatggaggtgtggacccacacccccaaggttctggattccaggaaaaagactctgcagcttctcctgtctgaccatgagaggaaatgtctctcttgtgtgagaagcggaaaatgcgagctccaggagctctgccaggagcttcacgtgacagatgaaaattattatgagggtgagaaaacaccctcccagatcgatgattctgctgtgcatatgatccgggacaacagcaaatgtattttgtgccgccggtgtacagcggtgtgtgaaaaggtccaggggatcacagtgatcggagctaacgaaagaggcttccggactcatattggctctccctatgagatgggattgggagagacaagctgtgtgtcctgcggccagtgtatcgctgtgtgtcctacgggagctctggcagaaaaggactataccgacaaggttctggaggttctcgcagatccgtccaagcatgtggtggtgcagacggccccctctgtgcgtgctgctttgggagaggaattcggctatcccataggcacggatgtagaaggaaaaatggcagcagccctgcgccgtctgggatttgccaaggtatttgacacagatttcggggcagaccttactattatggaggaagccaatgaatttgtggaaagagttcagggcggtggagttctgcccatgatcacctcctgctccccaggatgggtgaaattttgtgagcattattttccggatctgctggatcatttgtcaagctgcaaatctccccagcagatgttcggggctgtgacaaagacctattatgcagagaaaatgggcctggatcccaaggatattgtgtgtgtcagtgtcatgccctgtacagccaagaagtttgaaatcggaagagaggaccaggcggcagcaggagttcccgacgtggacattgccatcacgacaagagagctggccagactgatcaagcggtgctgcattgactttaacaatctgcccaaggaaggctttgatcatcctttgggagagtctaccggtgcgggagtcatctttggcgctaccggaggtgttatggaggcagccctgcgtacagcagtggaaaccctcacccacgagactttggaaaaactggatttccaggaggtgcggggcacccagggaatcaaagaggcggtatatcctgtggcaggcatggaggtgaaggttgcggtggtgtctggtcttgccaatgcaaggaaggttcttgagaaggtaagaagcaaggaggcagactatcatttcatagagatcatggcatgtccgggaggctgtgtgaacggcgggggccagcctcaggttccgggatatatccggaatttcacagatatccgcaggcttcgtgcccaggctctctacaaaaatgatgccaataagcgaatccgcaagtcccatgagaatccttctattaaaaagctgtatgaggaatatctgggagcgccgggaagccacagggctcatgaggttcttcataccacctatgtggaacgtgttataaatcaaatgtaaggaagatcgtatgaaaattattgatttccggcaggccaagtgcagacactgctacaaatgtgtccggggctgtgccgtcaaagccatttctgtccagaaccagcaggcccgcattatggaagagctgtgtatccactgcgggcggtgtctggaggtatgtccccagaatgccaaagccttttccagcgatctggataaaatcaagggttatatcaaaagcgggaagcccacggtggtttccctggcgccctcttatctgggggtgctgcccttcagggagccggggcagacagcggatgccctgatccggctgggattctctgctgtgcgggagacagcggagggcgctgcctatgtgacaagagaatatgcacgtctactgggcagcggagattacgaaaacatgatcactacctgctgtcctagcgtaaatgatctggtggaaaaatattatccgtccctagtgccctgcatggctcctgtggtgtcccccatgatcgcccacgggcggctcatcaaaaagatctatggagaggataccaaggttgtatttctgggcccctgtattgccaagaaaaaagaggcggaggatgatcccagggtgagaggagccgtggatggggtttttacctttcagggcttccttaagtggctgaaggaggagaatatctgtctggaggagtgtgataaccgtcccatggataatccggatcccatgataaaccgcctgtatcccatcggtggaggaattctggccagcgtggaggcagaggcagaaaagaatggctatgacaagatcgcggtggacggagtgaaggactgcatggagctgtttgaaaccatgaagcagggaaagctgacgaactgctttctggaagtcaatgtgtgccggggcggctgtgtgaaggggcctgtatccgggaaagaaaaggaaagccatcttccctccacagtggagatccagcgccgggttaaatatagggcttcctttggtgaggacctggaatccatttcaatgaaaaaagaatttgaagagcaaagcatcttctggggaactcccagagaggaagagatcagccggattctccaggcaactggaaaattcagcccccaggatgagctgaactgcggggcctgcggatattccacctgcagggagaaggcggtggctgtgctggagggaaaggcagagctggatatgtgccttccctacgccgtggccagggcagagtccatgtccaatgtggtgctggataagacgcccagcattcttttcctcacggacagccagcttcagattctggagtgtagcagcaaggcccaggaggtgcttcagagctcccgaaaggagatcctgggacggtatctctttgaattcattgactcttcccatgcggagaaggtgttttcaacccacaaaaatatattaaataaaagggtccaggtggaatccttgaagatcactgctctggagaccattgtgtacattgaggactcccattcgcttctggtgatgttccaggatattacccaggaggagcagagcaaggaaaaagcccttgccttgaaaatggaggcagtggaaatggcccagcaggtcattgacaagcagatgatggtggctcaggagatcgcaggacttttgggagagaccactgcccagaccaaggttacgctgtcaaagcttcgggacagcattctggaagacggggaggaatgagcatgtaccgcacagagatcgcttggaaaagtcttcataaatatggggaagaattgtgcggggaccgtgtggagctggtgaaggcccaggacggggacattgtgatcctggccgacggcatgggcagcggagtgaaggcaaacattctggccaccctcacggcccggattctgggaaccatgctccgggaaggggcgtccattccggactgtgtggaaaccgtggcaaagacgcttcctgtgtgcagggaaagacagactgcctatgcaaccttttctattttaaagatcgggcacaatggaaacggctggctggtggaatatgacaatcctctgtgtgtttttctaagacagggagagctggtgcgctatccttataaagagctggaaattcagggaaaaaggatccgggaataccggtttcaggcagaggaaaaggactgcctggtgctttttagtgacggtgccgtgtatgcaggcgcccaggaaattcttaattacagctggacctgggaggagctggccgcctatgggcagacatgcatgaaaaagcaaatgagtgcctccaggctgtgtgcggcgctgtctgaggcctgcagggagctgtaccagggaagggcggcagatgacaccacggtggtcactgtgcgcatatgcagggagcaggtggtaagtctcctcaccggaccgcctcttcaggcttcggaggatgaaaagctggtgagggcttttatggagagggaaggaaagaaggttctggcaggggggagtacggcaaatatggcctcccggattttggacagagaaatccgcacccttgtccaggagccgtcctcgcagcttccccccacagccgtcatggatggcatagatctggtcacagagggagccctcaccctgggaggggccctggagctgctgaagaaatttgcggaatcagattttgacatggattttttcagggagctggataaaaagaacggggcatcccttctggcaaagctcttgctggaggagtgcaccaccttgtatctctatgtggggacagcggtgaatgaagcttacaaggatgcttcgctcccctttgatatcagtgtgagaaaaaatttagtggagcagctggccaaggttttgagaaaattgggaaagaacgtggaaattcaatatttttaaagaggaaaaagcagcgggaaggagaaggcccgctgtttttttgttacaaaggaaagctgcttcgcagctgcacattgtggcactgcggcaaaaatccaagtattggaaatgagaaaaaacagaaaaggtattgacaaatgaaagtgtaactgctattgttacagtacgaactgtaattaataaagttacaaatcgcaggtaagaatgatttttcctaaaaataacaatagggggatcataaatgcgatacctgacaagtcaatttaagaaaaggagacaaccatatgggattttcattggatgtaagtgtaccggtattgaccgtgtttctccagggattggtcagctttttctctccctgtgtgctgcccctgattcctctgtacatcggctatctttccggggggacccggacggttggggaggacggaaaggtaacctataaacgaagcaaggtgatggtgaacaccctattttttgttctggggatcagctttacgttcttcctgctgggaatcggcgtatcggccctgggaaccttttttaacagcaagcagctgttatttgccaggattggaggaattctggttctgctgttcgggatctaccagctgggagttatgggaaaaccggaggttttagagagggagcacagacttcccttccgtttgaacacgctggctatgtcacctctcatggcgctgcttatgggctttaccttcagctttgcctggacaccctgtgtgggaccggcattgaccagtgtattgatcatgaccgcttctgcaggaaccaaggctatggggtttgttctcattggcgtttacacccttgggtttgtactgccgttcctggccgtgggattatttaccaccacgctgctggacctgttcaagcgccacatgaaggtggtccagtatactgtcaaggtgggcggcgtgctcatggtccttatggggctgatgatgatcacaggcaagatgaatgcagtgaccggatacctttctaatgtaactgcccagcagatacagggggataagaaggaagagacatctgtggaggatcaggcatccacagaggattcaacatcctcggataaaaatctggcttcggcagaccaggaagacaagcagactcctgaagcagatgagaattcaggaaatgagtctggaaagaaggaaggctcccctgaggagacagagacgaaccgtgatgaatccacggctcaggaggtacaggggccggaagaagatcaggaaggaagcaaagaagcttcccatgatccggctgagaaggacagtgatgtaacagcttctggggaagggcaggaggcagcggcagatgagtcacaagataagactgccggggatgcacaagccggccaggaggaaacgtctggggaagaggaaccaccgcttccagatattgtagattttactttgcaggatcagtatggaaatacccataccttatcggaatataaaggaaaaacagtatttctcaatttctgggcaacctggtgtccgccatgtaaggcagagatgccggatattcagaagctgtacgaggaatacggtgagggacaggaggatctggtgatcctgggtgttgccgctcccaattatggaagagagggcagccaggaggacattgaggcattcctggaggaaaatgggtatacctacccagttgtatttgatacaacaggagaattatttgcacagtatgggatctattccttcccatctaccttcatgatcaccacagaaggtaaggtctatggatatgtgacaggacagttaaatgaagacaccatgaagagcatcattacccagaccatggagggaagacaaaaataaaagaaaaagagagggagagccatgacaagtgaatttacggtagcagtacatggactggtatttctaaatcacaaacaagaagtggtatccagcgaggccttggccaaaaacgtttgtaccaatcctgcccgtgtgcgcaaggtaatggcaaaactgaaaaaagtgggtctggtagagaccaaggaagggattgaaggaggttatctgtttacaaaggacagcacacaggtaaatctggccatggtggcccaggcgttggatgtggtgtttgtggaggcttcctggaagagtggaaatccggaaatggactgtctgatcgcttcaggaatggcggggattttagaagagatctatggagatttggataaaatctgcaaggagcgtctcacccacattaccattgctgatattgacaaaaagatatttaggcaggctgggaaataatccgatcaatcggtgatccgcctctggaggggcgggtgtggaatgtatctgctaaggaacaaatttaatataggggctgcctcatgaaggacgatgttcatggggcagcccctttcctatgggcaaaaacagcggcccggacacaaagaagcaggggaattggaaggaagataaaaagcagtcttccatagggtttagagattgtttagagatgaatctggtaggattggttatgaaaccatgttatacttaatccaataattcagatatagaaagggattccattatgtttcgcagactgcatatacaatttacgctgttttctaccttgatcacaggactggtgctggcggccatgtcctgcgtgtgtctttatattgccgaatccgggatgaaggagaacagctacaattcttttttaaataattccaatgcctgcattacccatctccaaagtcagacgctgctcacccatcaatggcttttggaaatgcagcagtcttatggatttcatattcagatcatggacaatggacatacacttttttttgagaagatcaatcctccgggaaatgtacaggaagcatttgaaactgccagggagatatcaaaaaataagtacgggctgaatttggatcttatcaataccaattcttcccttacgaaaactgcccatttttcattttctgcccaggaagtttcctattatgcagagacggccctgattcccaagaaaaacggcaaactcagccttacccttttatactctgtggcagagctggagggacagatccatgaccagaggctgtactttttgacagctgccatacttgggtgtttcctattggggatttttgcatggtttttcaccgggcatatgttaaagccagtggaagagagccggaagcggcagacggaatttatcgcagctgcctcccatgagctgcgtacaccgttggcagtgatactctccagtttgtctgccatgagaaaagcagacagggaacaggccctgcactttctgtccaatatggagcaggaagggcaccggatgtcccgtctgattgaagacatgctgtcgttagcaaatgcggacaatcattcctggagtattcagaaaactcctgtggagctggatacgctccttcttcagacttatgaaaaatatgagcccctggcaagagagcggcagatgaagctgtatatccgcctgccggaggagccgatgaagccgtatccctgtgattgggccaggatcactcaggtgctttctattctcatagacaatgccttcagctatgtgccggaaaagggaaagatcattctaagtctgagtatggagggcagtcatcccttgatccaggtggctgacaatggccccgggattccagatgaggacaaggaggcagtctttcagcgcttttaccgcatggacagtgcccaccaccaaaaggagcatttcgggctgggactttgcattgccagcgaaattatctgcctgcacaaaggtactatacggatcgtggatacccctggcgggggagcaactttccggatccgtctgtaaaaaggaagaaaataaaatttgattttagagaaaacttagagattgccttgttatgataaattcgtaaacaggaaaaagcaccgggacaaagacatataagcggagcctaacttataatctctgtcctggtacaaggtttggaggatgagtcatgcaaaataagaaatttacaaaaacatggatgcctgcagcgctgtgtgcagtgctggcttcgtctatgattttatctggatggagggaaacggaagtgtccgtacaggcggctgaagatggacaagagaccggtgatgaggatggaaagaatactgccatggggcggtatctggaagaaactttggaactcccggaggaatgtcaatatatttccgccattgaggagctggaggacaaaaccctgcgtgtgcttggaatgagacaggatggaggcctctttatcctggattcttccgatggaggaaagagttggaaggaacagaactttttccaggagggagtgatcgggcccggctccgcaattttgggagctgccattggaaaggacggggctgcttttctccagacccaggattataccaaggtccaggaggcacaggaggaaggcagggagctttcctttgaggagcaggatgctcttgtagaaacacactggtattatgtggatacccagggcagcgcaaaggaaatccctgtggatgcacagaaggtaaatgcctttggaatgatcaagcgtgctgccataggaggggatggaatggtatatatcgctcctatcgcagggggcataacgaaagtaaatcccgaaacaggcgagattcttctgaacatggaggaaggaaaccaggttgtgaattttggactgattggcaatgaagtgctgattgtttgttatgacaaggttttattctatgatacggagacaggaaagcctgttgaaggggatacggctttggcagaggagatcatggctgataaacaaaatatggagatatacagcgtaagcgtttctcctattgtatttacacaaggggaagagccggataccttattttatttaaacaaaagcggtgtattctgccatgtgatgggaggcagtcttacagaaaagatcattgacggcaccttaaacagtttgggttccccggatacgtctgtgtccggacttactatggccagtgacggctccttctatgtggctggtatgggcagcacagggcagaaggttctctatcattatgtatacagcaaagatacaccttctgttccagataaggagttgaatatctacagcctgaaggacaataataccctccgccaggcgatcgctctttatcaaaaggagcacccggagatctatgtaaagctggaggaaggagtatccggccaggatggggtgacccagagtgatgccctgaaaaatctcaacacagagattatggcaggaaaaggcccggatattattcttctggatggaatgaacgcagagaattatgaagagaaggggatccttctggatatacaggaggttcttgctcaagtccgggaaaaggaaggtctgctggaaaatatcgtggacgcctatacccgggaagacggcagtatttatgagattcccctgagctttggaattcccatcgtggaaggggagccggagatcattgaggaaattacggacctggcttcttttacagaagcagccaagaagctgagagaaaaatatccggaagcaaaatccattgtctcatcagccaatgtgcagattttgtttaatgaaattcttgtggccaacagctctgcctggatgaatgaggatggaagtctcaatgaagaacagatgacagagtttttccgcctctttaaagagctttatgacatggaccagcatgaaggagaaggggatgcggaatattatgcggatatgtccggtcttgccagaaaagatgccagatatagcggaatgtctatgcttgcaaagtcaagatatttgaatccggcaaccctgtattcgcccaatggggcctccatgctttttgccgtgatggagcagttggaaaatgatggatataagcagttcaacgggcaggcagaaaattgctttgtaccctgcaacatcgtggggatcaacagtatgtcagaggatgtggaatcggccaaggattttctaagcttccttctgtctgctcagattcagagtattaataaagcgttgggatttcctgttaacaaaactgcttacgaagacagtaaattctggggagtgggcacaggagaattcaacggctatacgatttcaagttcaaataatgaaacaggtgtatcggtagagctgagtctgaaggatcttacccaggaacaggcggaagcaattcagaatatgggaaagaatcttaccgttccagtccagttggattccatgttccttgatacaatggaagcggagctgaggaagtatgtgctggagggagtgcccctggaggaggctgtgagagcggtcatgcagcagatgaatctttatctgtcagagtaaattttcaggcaggtttgggtagtttggcacaggggatgcgggaacggggaaagggacttctccggcccgaaaaccaacagaaggggtaaatatgaagaaaaaatatttgaagaaaatacaggtgtttctgctgtcaggtgttctggcagcagggagtctgctctatgggtgcggcggcagcgagaatgaagagcaggtgacagaacacagctctgaccaggaggagatcatgggcaggtatctggagacagagctttctcttccccaggaggatctcatggttcaggcagtgacccagttggaggatggaaccctgcggggagctttttccgacacagcaggaaactatacggtctatgataccaatgatcagggacagagctggaaggaggcagtggatcttcacaccatactgggactgaatgagtacagaagcgtccaaaagatggcactgtccagacagggagagatctatgccggtgtggtggcaaggtctcaggaggaccctgagagctatacctgtgagaattacctggtgaaaaaggatggaacggcaatgaagctggaggcagataaaaaggaggactctctttttgtatggcaggcgctgtttgccagagacggaaccttgtatctggaggttttaggaggcggggttcaggaatatataccggggaaaccacaggtggagaaggtatatgaagaaggaaaaacagcacagggaatgggggtcattggaaataccctgcttcttattgtggatttgtctgtccattattataacagaactacgaaggaaccggtccaggacgaaaaggctcttacagagcagatcacggcaaagaaggaaaatatggaggtggtggcgtcctccagctatcccattttgtttttagaggggacagaagaggacaagctgttctatgcaaacagagaggggatgttctgctatcagccgggaggtgccattgttgaggaggtcattgacggagagcttacttccttgaaatcaccggattatggattggtgggtggagtttgtctggatgacggcggctttcttcttggaatttttaataatagcaaaggaaagctattgaggtatacttattccatggatatatcagccaggccggagattgagctgaccgtgtattccatgggggacagcaatgtgctgaaacaggcagcggccctttatcagaaggaaaatcctaatgtgctggttcaggtccagacaggacttaccggcgaggatgggcttacgccttcggatgcccagaaaaacctgaatacagagatcatggcaggcaaagggccggatattcttctgctggatggttttaacgtccagccttatatggagaaaggccttttggcagatgtctctcagcttcttgagtcctgccccttactggaaaatattaaagaggcttataagtcagaggacggggcaatttataggatgcccactggatttggaatcccattaaagtttgcaagaagccaggatcttgccaggattggagatctggcctccctggcggactatgtggaggagcttgctcaggaggaaaacggctcagaattctatataggcccttatgtctggggagctaccgcacagttattaggaagacgtatggcgcagttttatacaggaacctggttaaagccggacggcaccctggatccagatcagataagtgacttcctggaacagtgtgggcggatctatgcaactgcagatcatgaagtggaagaaaagcagagattatcacaggaagaaatgtatgaggatatctggcagtcttatatattgaaaacgaacaccccaagtgtattccagggtctttcccttatggaatgcggagcggtgatgactcccagagaatatgtggaagtgtcaactgctctgggatatgtacaagattatgattatgacctgtgggatttggagaaggggtttatccctgtcaatgttgtggccattaataatcaatcaaaaaatctggaggaggcgcaagatttctataagtttctgttttctgatacagttcagaggttaaagggacgcaatggaattgctgttaatcagaatgtatatgaggatatgaaatactggggatatgggactcatgattttgatatggaggagttttcctcaagtgatcccaggacaggggagtctacgaatttttcctatgttcagccagggcaggaagagatttcccgtatacaaggcttgggcctgcaggtcacaaagagactggatcaaaatcaatttttgtgtgaagccgcagcaaacggattagagatgtatgtccatggagatttgtctttggaggaagccacagataaaatcatgaaggaagtgaatctttatttagcagaatagtgaaaaagagaatttttttgaacaaaggggctgccgctattatgcggcggcccctttagataaatcagcggtaaacctccaggcagtagccgatgcccctgacggttttcagggaaagggtgctttggacagatttcagcctgcgtcgaaggaaatggatatagttgtccagatttccctcctccacttctgcatcaggcccccagacttttgtgaggagggtgagacggggaagggtctggccggggttgcgcagaaagatttccaacaggtcaccttctcttttggacaaggtgcaggtgttttcattttttgtgagtttttttaaatctgggtcgtaggagatatcccccagggaaatgtccccggagttttcccatttttggggccggcggcggatacagcggatccgggccataagctcctggaaggcaaagggttttaccatataatcatcagccccgcagtccaggccggttactttatcctccagctctcccagggccgtgagaatgatcactggagtagagatgttgtctcttcgggcttttttcagaacagagataccatccatcaggggaagcatccggtccagaagaaccaggtcataggcgttctgctccataaaatacaggccgtcttctccagtgtgaacagcatccaccgtaaaattttctttttccaattggaattttaaggattcacataatcttatgtcatcttccacgattaaaattctcatgttcattgtcctcccttggtgtcttgttggcattatatcatattttatcactttgaccatactccacgaatctctaaattatctctaatctggaaaattgtttacaggggtccttcaaaagtgcgggaagtttcagcaggtacaaaaaagcacaaggttccatgtgagggcaggggatgaataatattgctccaggtgtatagttgaaaatttcacaacattagagaaaaattagagattcctgtggtaagctttgttctaaaagaaacaagaaagtaaggaggtctttccatgagacatatccagggaaagagaaccataagacaaggaagtgcaaaagcgggagccatggccccggggaggaaaaagaagtaccagtggaagggacttctctttattctgccaagctttgcaggggtgtgcctgttcctgtttatcccttttctggatgtgatccgccgctcctttacagaggcggtgagcggagcttttgtggggtttgccaattatcaaacgatttttcataaccaggcgtttttgctggcaggaaaaaatacccttcggtttttaggggtgtgcataccgattctggtggccttttcccttttcgtagctgtgcttctcaacaagcagggaaaatacgggcaggggatcaaaagtatgttccttattccaatggccatcccagtggcctcagtggttcttctatggagggtgctgttttataaacagggaatgctgaaccattggctgtccgccctttctgtgggatctgtggactggatgaacacggatgcagccttctgggtcctggtggtgagttatctgtggagaaatctgggttatgatattgttctgtgggtggcggggctgtctgcgattccggaaagtctgtatgaagctgcaaaggtagacggagcgggagggtggaagtgctttaccaggatcacccttcccaatcttcttccgtccatgttcaccattgtggtgctgtcccttttgaatgcatttaaggttttcagagaggcatacctggtggcgggagattatccccatgaaagcatgtacctgatacagcatcttttcaataactggtacagggatctgtccctggataaaatggcggctgcggcagtggtgaacagcctggggatctttctgttgatcctgctgctgcagcgggcctgggatcggggggaaaccggatgaaaaagaaagcgatacttatgatcttagtgcttttggcgctgatcgtcatatcccctgtatggtttcttttcaccggttcactcatgggagacctggagctgaaggaagcgctggcaccggtattgggccaggcagagggattcgtatcctggagcttcctgcccaggtatccaactttagtatcctacgtggggcttttgctggacacaccgtccttttttgtgatgttttggaattctgtgaaaatgactgggtccattcttttgggacagctgctggtgggcgtgccggcggcctggggatttgccagataccgttttccgggaaaaaagatcctgttcaccatctatatcgcactgatgatgatgccttttcaggtgctgatgttatccaattatcttgtcctggatcagctttctatgctggataatcagtggggggtgattcttcctgctgtgttttccaccttcccggtatttattatgtaccggttttttgaaggaattccggaagctcttttagaatctgcaagattggacggggccggtgagttgatgctttttgtaaggatcggtatcccgctgggctctcccggaattatctcagctatggtgctgggatttttggaatactggaatttaattgagcagccaatggcttttttgaaaacaaaatccctgtggccgctgtcattgtttctgccaaatattgatatgtcccgggcggggcttgcctttgccacctcagtggcggttctcataccggccttgcttgtatttctggcaggtcaggattatttggagcaagggatcatcgccacagccattaaggagtagattatgaagcgtaaaaaagtaatggaattattagctatattttttatgtgcatgctggtttttactattttgtccagggcagcggatggtgtgactctggccagggtacagatctctggcctgcagaacctgatgatcacccatagggtcaccggcagcggacgggtggagggcacggtgaaccaggcagtattcacccaggaaggacagagggtggaaacggtcaatgtccaggagggccagaaggtggcaaagggagacgtgctttttcaggtggatcagggtgtgcttcaggagtccatccaaaagctggagaaagaggtagagaagctgtcactgtcccaggaggatctggaaagtaaacagcagctggaattaaaggaccaggcagaagccattgcccgtgcccaggaggactgccgccttgtagaggaaaagggagagattgccattaacagcgcccagagcgatctgcagacggctgtcaataaactaaattccctctataaccgccgggcagcgggggaggaaggactcacggaacagatcatggctcaaaaagaagccgtaaaggcccaaagagataatctgaattctgtgatcatccagagaaatgatgcggtcactacggcccagagagctctggaggatgcccaaaagccaaaagccggggacagctctgtaaaaagcagtcagattgacaaggagcagaaggtaaaggagctggagaagctgcgggcactggaaaaggatcaggggcaggtgaaggctcctgaggaagggattttgtataagcttcatgtccaggtgggaagtcagacctcccaggaggcggccgccattctcacacttttgaagggggattatcttcttaccgggaccattgacaaggacagtgccaaatatgtagaaaagggagacgaggtgtctctgaagaacagcagcggcaaggaaggtccggtgggaagtgttcttcgcatacaggaggatgaggaggataaaaatctgcgcagggtgacaatcctagttcctcccgattccatagaattgggtgagatggcagagttcacggtctctcaggaacaagggccctatgcaagctgtattcccctgtctgctcttcatgaagcaaacagtaccaagtttgtgtacgtgttggaggagacgtcctccattctgggagaggagcttacagccagaaaggtggaggtgcaggtgaaggataaaaatgagcagtttgccgctttggcggaaggctccctgagcagcacccagaaaatcattatccgctcggacagggagattcagggaggcagccgtgtgcggctggaggagtcatgacaggagtgaaaaaaaaggattcttatattcaggctgtgaagaaattcttgttttttctcatggcgcttcttttctaccttctggctgtcttgtaccatcaaaggctttatgaaaacagttcagcggcagggatctctctggcgggggtctttcctgagaccaccagggtgcgggaaattctaagagctgaaaaggagcaggacctcccctctgattcctgcttttatgaaagtctgggttatcagagcctggaaagaggcagcggggatgggaaaaccagcagcgaggtggtggctcttctgggaagtgcggacctttacgaccaccagatgacaggatttgcccaggatgacacagaaggctgcattctgggaggaaagactgcctgggagctttttggaagcagaggagttgtgggaagccaggtgatctggaaggacagggtttataccgtgcgtcaggtgctgtcccaagaggaggatttatttctggtgcatccaagggaggagattgcttttcattccttatttcttagaaccgggggcagttccgcccaggagcagaccagaaatttccttatgcgtcacggactttctggggagctgtctcaggcggttcttctgaaaattttagccaggctgtttttatttctgtttcctgtgctgctggcaggttttttcctgagaaggctgtggagggagctgggggaaatgaagctgggaggttggggaaagctggcagggactgtggccactctagtttttcttggaatctttgcgttttttcttgtgaagagcattaccattcccagggactggattccaggaaagtggtcagacttttccttttggtctgataagattcaggggcttttgaaggaattccggttcttcgtccgttcgcccaaaagctatgttcaggcggaacagctgatcttttttggaaaatcggtgctgtgcagcctgtgttccgtgcttttttggagggaaagtacacacacgcaaattctttgacatcccctgttggctgttatatactaactgtgacaatagacagaggaggctggcagaacagcggcatttctgcctgtctaaggcctttcgcgaagtatagactgatacataccctgcgaaaagcaggaaagaggtacctgaataaatattgcacaggaaggaatggatatggaatatcaggtaaaactaatagaaagccccggggaaattgggagatgccaggagtttgccatggaccatttccagtggacacaaaaaatggctccaaaggcatatggaaaaatgggctatataaagggtgtggggttttatgtaaaccttgtgtgtgaggaaaaaaatcccagacgattgtgcacagggcccagggggcggtacagtataaagccgggaaccagggtgtgcgatgacagcgccatggaagtgtttttcgcctttcccaaagagggagaggccatctcagatgattgcttctatgtgaattttgaggtgaatggaaacggtgagctgtttgcccagtatggcaggggaagaacagacagaaagttcctgccccaggaggaatacaaagcctgccaggttcaggctcaggttcaggaaacaatctggaaggcggccttttttgtcccggagagttttttgaaaaattactgccaagtggatgtgagcaggccgggcagcagcttttactgtaatttctataaaatttccgagacgtcaaagattgagcactatgcagccttcgcccccctggacagccccacgcccaatttccacctgccaaggtgttttgcacatgggacggtcatagaataaaaggggcaggcggtgaggaagatgaaacttaggaggttaggactatggtaacatttcgttatgtgatcaaggatgaactgggaattcatgcaagaccggcgggaatgctggtgaaggaggccaatgggctaaagagcagcatcaccatggctaagggccagaaatctgcggatgtgaaaaaaatcttcggattgatgggcctgggagtgaaacaaaaggatgaggttaccgttactgtagagggcagctctgaggaggcagacgcagcggttataaaggattttctggaaaaacatttataaacagcacttatgagagcaggtgcatgaagctgagcggcctgcggttatttcataaaaaccccctgtttcagcggcaagaaagccgggtgaacagggggacttttacataaaatagaaaatcagaagcccagcttttcctgtgtgagaatcacggtgatccgtccgggaattctggatttgcgggtgatcatgatctggcagcagatacagtctggactcagacagtctgcacacagtccggtttgggagcagggcgttttggcgcctacccggagggcattgggaggacaggccagggtgcggatgcggtcaatggcagtctgtacattggcgcacattttatccatgctggccaggacgatgacattctgggggccgtgggcgagacaggctacccggttgctggctccgtcaatgttcaccagctccccttcggtggtgaaggcgttggtgctcatgagaaaatagtctgcgcacacgatctttccgtagagggctctggcttcctctggggtatctgcggatttccggtcaataaagtcgtagtttccgtcaatgatggcctgggttacccccgcctgttccatggacatggtgccgccccaggtgacagaggagccctctggaatgagggagaggattttatccctggcttcctccttggtggcacagtaacagcaattcatgcctcttttttcaaagcgtttcaccaggacagcggcagctttttcattgctttctgatagataagacataaaacggcctccttattatacaaaatttcctataggatacaaaaattatagcattaaagttttgcattttcaattgaggtatccttaaaaatatgatagaataaaccgatatagaaagaaatttgatttaagagccaagaaatataaaaagctggctcttattactgtgaagaaagagaggaaagaatggggaaaatagcggttgtaacggacagtaacagcggcattacgcaggagcagtccagggagctgggggtttctgtaattcctatgcccttttttattgatgaaaaaatgtatctggaaggaatcactttaagccaggaggagttctatgagagactagccaatgacgagaatatctccacttcccagccaagtccaggggaagtgtgcggcttatgggacaaccttcttcaggaatatgatgagattgtccacatccctatgtccagcggcctgagcgcttcctgtcagacagctttggttctttcccaggattacgatggaaaagtccaggtggtgaataatcagaggatttctgtaacccagaggcagtctgtactggatgccatagaacttacccaggcgggaaaaaatgccagagagatcaaggacattctggaggcagagaagctggaatccagtatttatattaccgtagagactttaaaatatttaaaaaaaggcggcaggatcaccgctgctgcggcagctataggaacggtgctgaacctgaagccggttctgcagatccaaggagagaagctggatgcctatgcaaaggtaagaggaaagaagcaggcaaagcgtgtgatgctgaaagctatgaaggatgattgggaaaatcgttttgacggatatgtgaaggctggacagatgtgtctgcaggcggcttatacaggtaatccagaagaggcagaggagtttaagaaggaaattcaggcagcattccctggatgtgaagtgcatatggatcctctttctctgagtgttgcctgtcatattggacagggagctctggcagttgcctgctccaagaaggtgagcctttcttaatggacagagggtgtttttacaaaaacagattaactaaggagcttgagaagttatgaaaaaaatgatggaacttttggaggaagagctttcagatgcgtttgtcaaagctggatacgatccttcctatggaagggtgacaatctccaaccgtcccgacctttgtgaatatcagtgcaacggagccatggcaggggcgaaggcctatcataaggcccccattatgatcgcaaaggacgtggtggctggtctgggagaaagtgagattttttccatggcccaggcggtaaacccgggatttattaatctgaaggtaaaggagagttttctggcctcctatttgagagaaatgcagaaggatgacaagctttctgtggagactgccagggagcctaaaaccattattattgattatggcggaccaaacgtggcaaagccgctccatgtgggacatctgcgttcagccattatcggagagagcctaaaacggattggccgctttgtgggacataaggtgatcggtgacgtgcatcttggggactgggggcttcaaatggggctcattatcaccgagttaagacacagacagccggaactggtctattttgatcatggttatcagggagaatatcccaaggaagcaccttttaccatcagtgagctggaagaaatttatccctgtgccagtgcaaaatccaaggaggatgaggaatatcgaaatgaggccttacaggccacccatcttctccagcagggtgagccgggatacatggctttgtggaagcacattatgaatgtatccgtgacggatctaaagaaaaactatgaaaagctcaacgtgacctttgatctgtggaaaagcgaatctgatgcccagccctacattccggacatggtgcagatgatgaaagacaaagggtttgcctatgaggatcagggggccctggtggtggatgtgaaaaaagaggaggataccaaggagattccgccctgtatgctcctgaagtcagatggggcttctctttacacaaccacggacctggctaccattgtggagcgcatgaagctgtttgctcctgatgagatcctgtatgtggtggacaagcggcaggagctgcattttgagcaggtattccgctgtgccaggaagaccgggcttgtgaacgaggacaccggactttatttcctgggctttggaaccatgaacggcaaggacggaaagccctttaaaacccgtgagggcggtgttatgcgtctggaaaacctgatcaaggatatcaatgaggaaatgtaccacaagattgtggagaatcgaagcgtaaaggatacggatgctcaggccacagcccagcaggtgggactggcggccatcaaatatggagatctgtccaatcaggccacaaaggactatatttttgatgtggaccggtttacctcctttgagggaaatacagggccttatattttgtataccattgtgcgcatcaattccattgtgagccgttacgtggaacaggggggagatcttttggcaggagagattcagggagctgtcagtgaaaatgagaagaatctcatgaaggagctgacacgctttggtgaggtggtggaaactgcccaccaggagagagcgccccataagatttgtgcgtatatttacgatgtttctaatgcctttaacagcttttatcatgatacaaagattctcactgaggagaaggaagagcagaagcagtcctggatccagctgctgaagctgaccagagatattcttcagacaagtattgatctgctgggattctctgcaccggagagaatgtaggaaagaagaaaataagaatgaaggaaagccggaatggtgggcctgtaggaagacaggaggactattccggctttgttctcagctaatagacggataaaataatttatgatctggttccccggtgttacgtcctttggacaaccgggctggcagctttacaaggaagagaaaaaagaggtttgatgggcagtactgagaaggaggataagaatatgacgaaacgttatgcaaatctggccttgatctatgggatcctggctatggtatccggagttttttacagggagtttacgaaatttcagcattttacaggcaaaacaaatctgtctgtgatgcatacccattattttctcttgggaatgtttttctttttactcttgctggtgattgaaaaaaaattccggttttctgtagagaaaaagactggatggattttgctggtatatcaggcaggattgaatattactgctctgggatttttgatgagggggctggcccaggtgtggggaacccagctgagtaagggcatggatgcatccatttccggtattgccggtattgggcacattcttacaggagtcagtatggtgctgctgttgcttcagatcaggaagaaggcggcgcagtgatgctgaaatttaacaggacaaatgtgagcacaaaataacgggagaaagaatccctttgatgatagactgtagttacagcaaaggagggaaccatttatgggatgggcagagtcaattggagaggcagttgaatacattgaggagcatattacacaggacctgtctgtggaaaaaatagccaagcatattaatatttcacctttttattttcaaaagggctttgccatgctatgcggtttgactctgggagagtatatccgcagccggcggctggctctggcaggcaatgaactggcagcagggaatgagaaggtcattgatattgccctgaagtatggatatgattctccggacagctttaccaaggcatttaccaggttccatggtgtcacaccttcacagctgagaaaagaggagacgatgctgaaatcttttgcacccctcaaaatcaaactatcattagaaggaggatatcttatggattataagatcgtaaaaaaagaagcattcacagtaattggaaatgcaggaacattttcctatgaaggggccaaggaaaccatcccgcagttttggcaggagcactacaaagagggtaagggacagacggttatggggtgttatggcatcaatattgacgaggatatgggccaggacacctttgagtatctcatcgctgacccttatgacccattgaaggaagttcccgaaggatttgtcaccaaggtgataccatcctttacctgggccgtatttccctgcaagggggcaatgcccaacgctcttcaggatgtgaatataaagatcttctcagaatggctgccggcacttaaagattatgagtttgccgccggatactgcattgagtattatgatgacccaacgaagtatgccaaagggacccaggatgaaaattactactgcgagatctggctcccggtaaagccgaaataactattgggaaaagagataaaggagtaagagtttcagtccgaagattgtgtatgattgaaaaccatggctgccctacagatttcatttggcgggcagccatggtttttttgaagtttctttttaattgtcctgtgcggggaaaaaggactatggctgagtataagtggctgagaataagtgactgggaataaatgagcgcgcaaaagaaaataggtctccacaaaaggaacgtaatgtgctataatagatacatctgaagaaattttatttgtcaatacagatcaggcagttctgccatcaattttcaacaacaagagtgaggattcatccgtctgcgctggtgcagggtggaagcggtgaaaacaagaggaatggttctctcttttttgcgtgcatggagtcagcaggcatttgtctatgcagggaaactgggagacaggggtggaagtggattgtaaataaataaataaacaaataaacaaataaacaaataaatatcccatagacgtaaggggggaaggacgatcagccaggtaggaaaagaactgggaggacgttatgttgttttggaaaaaatcggccagggaggttctggtcaggtatttttggccagagacatgcagttgggaaagctgcgtgcgataaaagcagtttccaaagaattcataaatgaaagagagctgttgaaaaagcttgagcaccccatgcttcctcaaatgatggattatgtggaggacaaggaaacaggatatctggttatggagtatatccagggaaagaatctgaagattttactgagagaaaaaggtccttttaccaaaaatcaggtcctggattggggaaaacaaatctgtgcagtgatggagtttcttcattctcagaaacctcctgtgatctacggagatttaaagccggaaaatctcatgctttctgtccagggaaagttatatctggtggatttgggcggtgcggtgaagggatacaaggcagaacatagagcatgcttcggcaccaaagggtatgctgccccggagcagtattggggagaggcagtgcctgcttctgatatttattcctttggaaaaaccatggctgagctgttgggaggcatggacaagggcggaagatatctggaaaaggttctgaagaaatgctgtgagaaagaaaaggaaaaccgctggaacagcttcactgtattgaagaaaaaactggaatggcaaaggcgtgtttctgtgaaaaccattcttctgggagcaggttttcttacagtgcttttaggggcttctgccgtttatttgtatggcagggggacggctgtgacaaaggaaaagtccgtagagattccggtgaccgtgaccaaaaccgtggtggttaccaggcttccatcttcttctccatccccggacaattctcccatgaaggatgggaaacacttggattcctcaaaatctaattcaaaagaacagttcttggaggaacttaccaatatacagccagtattgacccagggatttcttcagatccccagtcaggagggaaaacaatttctcagacaagcagaggccgttctgggggaaatggaggaggcatatccggaaaaagaggaatggtgcagaatcaggcttcttcgtatacagacggcggatgccctggaaaagtggattcaggagaaaagtctcttggaggagcttctggaaaaatatccggactgcagagaagcctatggttggtatggggattttctttacagaaacggagagaaggagaaatccatttggctgtgggaagagggcaggaaaacatttggctccctgaatctgtatggggagcagcgttggagggaggtattaaaggatgaagaaaattcggagaggtaagggaatctgtgtgggactgtgcactgctttggcggtggtaccattagccagggaatctctggcagatacctggaaccagggaggctttcaggtggatataaatcccggggagaactgggattatggcttctatgagccccagccaggcggccagtctccccaggagccctgggtgggagaagactgggggcagggaggaaatggctatgaccagggcaataattatgaccaagggtatggttatgaacaaggcgataattatggtcagggcaataattatgaccaaggatatagttatgaccagggagacaattatagtcagggtgatttttatagccaggaaaataattatggtcagggagatccttatcaacagggggactcctatggcgctggaattagtttcggtcaggggaatagttatgctccaaatggtatggatgtctcagatatctacagtcaggaagagatgtatgacccaggagctgtatggggccagagtcatatgcaatatccggcgaacctgaacgaactggccccaggtgttccccaggggcttggtgaaagtcaggaaaatacaggcaacagaacccgtgagcaggatgcagcacagaacccaaccgatgaaaaagaaaaaagcagcagtgattcaaaagctgcttcttctgacaaagagaaaaatccatccagtgaaaagcctgctataaccgctgtacctgaaaagaagtctaataaaggatctgataaagagacggataaggaagctggcaaaacgtctgataaaaaggaggaccaggagtggctgactcttttcttggaaggcggttccggccaggaaatctatatacgtgtggatggaaatgtgcaggcagcggttatttcttgtcagacggatggtaaggaatgctattatcactgggagggcagccggatcgtgccggaaattccccataaggatggggccgaggaaatttctgttgttttaagaagtaaaagcggacagctctatacccttaacagacggatcagctgagtgccaggcgtgcaccggatgcctgcaggtacttaaaaataggacccctgtccttgcgggctgtgaagaaccgtgctataatcaaaaaaatacgaagaaaaattcatttgccgaaaggagtttgtatgtatcaggcaattttatttgatttagacggaacactcacagcctcaggagagggaatcaccaaatctgtacagtatgcattgggaaaatttggaattgatgagccggatttgaagaagctggaggtatttgtaggtcctccattaaaagaacagtttgaaaaatatgcgggttttgatgaggaacaggccttacaggcagtggagtactatagagaacggtaccgtaccataggaatctttgaaaatagtccctaccaagggattgaacaggtgctggcacagttaaaggaccagggatatattctggccgtgtcctcttccaagccagagcatttcgtattgcagatcttggaacatttcggactttctaaatattttacagagatcgtgggaagcgaaatggacggcaggcgtaccaataagacagaggtcattgaagaaaccttacgccgtctgggtctggagaattccagggacaaggtggtaatggtaggggataaggagcatgatgtgctgggagcaagaagagccggtctggcctgcgtaggtgtggcctacggttatggtacaagggaggagctggagcaggcacatcctttgaaaattgtggatacggtcagggatttgggagattttttcgcgtaaaccctctgcggcaccagagctttttactgaaaatgtggagggtgttgtatcccatcggcattcattatttttccatgcagatcgtatctgtattatttatgtccgttttatatcttttggggaaggaaggggaaaacccttatacctatgttctgtggtgtaacatgctgggcgggattgttgccatacccattgcctatttcttttacaaaagagatcagcgcatgaggggagcttttgcatacaagggattaaataaaagaagctggggagagggactgctggtattttttatgggagcggctcttgcccagtatctgaatctgatcctggccatactgcagatgtttcggatttttccggaatatagtgattcgatggaaaagattctggagaatcagagcttccttctcatgtttctatggactggcatcgttgcccctatctgtgaagaattgattttccggtggcttatttaccgaagactgcgggattggatagggatctttggagcagcatttatctcctcagtgttgtttggactttatcatggaaatatgcttcaatttatctatgccactttattgggaatgctcatggcattgtccatagaatgtacgggcaatctctatgccagcatttttatgcacatgggagcaaatatatgggccagcctgatgtcctggtacgggccccagattgcgcagatcgctgggggcagactgtatctgtggatcatgtatggatttttgcttgtcatcgtgggaggagtcatctactttgtgagagtgaataatcgaaaaagccgcaggtttttgcattcatgagagggtggctgtaacttatataaaacaaaaaaacagggatgtatttgtagagcggaaagccacagatacgtccctggtttttttatgcccctgcctcagttcttttacgaaataaaatgaaaggctgacattgttttaaataaagtttttggattttcggaattcctttggagaaatatcgtttttttctttaaacttccgatagaaatagctgcagttgttataaccgatagcacagatgatagattctatagaaagttgtgtatgcgaaagaagccattctgcttgttgcagctttcgccgctgaagcagttctttaaaattactttgcatatattttttcagcagccggcttatataatagggagtctgattcagttctgctgagatatgggacagagttccgtctttatagtgtgtttctatatatttcaaagtagagaaaaccaggttctgctcatactggttcgggttgttttgattgattttatctgcaaacatggacaagttcatgaaaagcagactaaaggttgtctggtttaaagtaacagtgccggattttcctgaaagcagggtccatatcatgttttctaccagattttgtacagggacgatatcttttgcctgaaaatgtaaataactggacagagacatattttgagacagcgaagagattaaaaaatctttcagtatattttcgccttcaaatatagagagcgtatggtcaaaaaactcaggaaggatgataaaattaacggcaatatcgtgtatattggctggaaggatttcctgagtcgcgtattgatttaaaaacagaagatcaccggggtgaagggtgatttgatctgtatcattaataatatgggtagtacttccggtacacatatagatcatttctacatagttatgggtatgcctaggaaaatgcacaaatcttgtgtgcggcctgagataaattaattgtcctttttttaatagttttttgctgtcgatagtaaaattggcttgcgaagtatagagttccttttggatatgtttatctccctctaggatttttctttcttcatcagttatttcctgaagcttttctaatatttcctgacgcatgggaacaatcctgccttttctataatgtgatttaagtctatcatatggaaattgtttttgcaaataaagtcctaattttttgaaaatcaagacctaaaattctatcctttcagcgattataataagtttagaaattgaaggaggacaattgaatggcggagtattatctggctgtggatattggagcatccagcggccggcatatgattgggagtctggaggacggaaaaatctgccttgaagagatttaccgcttcccaaacggtatgaagcgtgaggatggatgtctttgctgggatgttcaagcactgttttatgagatcaaagagggcttgaagcggtgcaaagagattgggaagataccgtcctttatggggattgatacctgggctgtggactatgtgcttttggatgagaatgaccggatccttgggaaaacatacggataccgggatggcaggacaaacggaatggatacaaaagtatatgaagcggtttcacaagaagaactctatgcgcgtaccggaatccagaagcagatttttaacaccatctatcagctgatggcagttaaacagaaggatccggatttgtttgctaaggcggagagtatgctgctgatcccggattattttaattttcttttgactggggtcaaacgtacagaatacaccaatgcgaccacgacacagctggtcagccctgtaacaaaagactgggattatgagctgattgaccggctgggttatccgagacagctcttcggtaagatcagtaagccgggtactctggtagggaatttctgtaaggaaattcaaaaagaagttggattcgactgtcaggtcatccttccagccacccatgatacaggctctgcggtggttgccattccaaccgcaaagaacgatgcattgtatattagttccggtacctggtctcttatgggaacagagcttttggaggctgactgctctgcaaagagcaggatgcgaaaccttaccaatgagggcggttatgaataccgtttccggtatctgaaaaatatcatggggctctggatgatccagtcgatcaggaaagaatttgcagaggagtattcctatggatatatctgtgagcaggcgaggaaacaaaggattccgtccgttgtggactgtaacgatgatatgttcctggcaccatccagcatgacagaggctgtgaaggcttactgtgaaaataccgggcagcaggtaccgcagaatgagtgggaaatcgcagcagtgatctacaacagtcttggcaggtgttatggagataccgtcagacagattgaacagatgactgggaaactatatgactgtatttatgttgtgggtggaggttccaatgcagaatacctgaaccaggtcacggcaaaatatacagggcgtactgtttatgcaggacctggagaggctacagccattgggaatctgctggtgcagatgctctataatcaaaaatttaaagatttaaaagaggcaagagaatgtgtaaggaagtcttttgaaataaaaagatacgaaaacaaatgacgtgatcattggaagaactggtaggaggatttaattatgttagtggatacaagagcaagaataggtgttttttcggttgctttgggagcatatttgccgcagtttccatcattggtgccggaatttgagtcgcagtatgatgctttcaaaaaaatgattccggatacggtagaaatcgtggacggcggtatcgttaccacaaaggagctggcgcaggaagccggtgacaggttccgcgcagcggatgttgacctggtaatcctgcagcttttgacttatgcaacatcttataacatgcttccggcagtccgtgacctggatgtgccggttgtactggtgaatatccagaaaaagaaagcgcctgactacgggaatacagataccgccacatggctgggtgagctgtatgcctgcggagcagtcggcgagatggtagctgatcttgagcgtgccggtaagcgccatgcagtcattacaggcgtagcagatggcaaagatcaggaaacccaggctgagattgaggactggtgcagggctgcacaggtgcgcaggagattccgtgatacaaacctcgcccagattggaaggccatatccgggtatgatggatttatatattgatgaaaccaatctctatcacaggatgtttctttacaccaagcagttcgactgggaaaaaatgtgggcgattgctgatggtattacagacgagaccgctatccaggcaaaagcccaggatattcttgacacctttgatatcgagggcggcggcaccatcgaaaaggtctgggagatggcaaagtatgttgtcgcttttgaacggtgggtgaaagacgagaagattgcttttgttgcttctcattatgacggctttgcgcagggcaaggccggagttctggacagtatgctgattcctgccttctctatgctgatcaagcaggggattgcctgtgctgtagaaggtgatattaaggttgccatggcaatgagtattcttaagacaatttccggtatgggacagttgtctgagatgtattctattgattttgaggaagacatctgcattatcggtcatagcggttccggtgatgctgctatctcagataagaagccgacgatgaaaatcgtgcctatgtttcacggaaaaacaggcggtgggtatctgacccagttctacccgcacctgggtccggttacatacctgggtatcacgcaggataaagacggacatttcaagtttgttgtagcagaaggcgtcaatgaagcaggtccgatttttacgttcggtgataccaacatgcggacacgtttcagctgcggggcaagagaattctgtaataaatggagtgaggccgggccgacccaccatatggcggcagcatcaggcagacatattgatacaattctgaaggttgcaaagatttttaatgtgccggtagatattgtcacccgataggagtgatcatgagctgatcgattttggaaatgagcagaaaggaagaataaggatgagtattacagatgtaaaatttgttcagggatttatccgtatgtgtaatgatggatgggagcagggatggcatgagagaaacggcggtaacctgtcctaccgtatgaaggatgaggatgtagaagaggtaaaagagtatctcagcacagacagagaatggaaagcaattggtacgaaggtaccgggacttgcaggggaatattttatggtgacaggaagcgggaaatatttccgtaatgttattttggatccgaaagacagtatctgtatcattgaactggatgataagggagaaaactatcgtatttgctggggactgataaatgggggaaggcctacaagcgagcttccaagccatttgatgaaccatgaggtgaaaaaggcagcgtcgaatggtgcgcacagagtgatctatcatgcccatacgaccaatgtgattgcgcttacatttgtactgcctttgaaggatgaggtgtttacaagagagctgtgggaaatggctacagagtgcccggttgtatttccgtcaggaattggcgttgtgggatggatggttccgggagggagcgatatcgcggtggcaactagtgagctgatgaagcagtatgatgtggcaatctgggcgcatcatggaatgttctgttccggggaggattttgatctgacgtttggtttaatgcatacagtggagaaatcagcggagatactggtaaagatgctgtccatgcgtccggacaagctgcagactattacgtcacagaatttccgtgatctggcagtagattttcatgtgacgttacccgagaaattcttatatgaaaaatagcagatatggagaaatccatagatgaatggtagaaaaaatttactaaataaaggaggaacaggagtggctgactcttttcttggaaggcggttccggccaggaaatctatatacgtgtaaatggaaatgtgcaggcagcggttatttcctgtcagacgtatggtaaggaatgctattatcattgggtacggttatggtacaagggaggagccggagcaggcacatcctttgcattcgtgagagggcggctgtaactggttcagatacaaagagtcaaggcagatctctccagctaagtcaacccataatttgttattttatatagcggtaaattatagagggacgccccccggttcgataatcaatatcactgtggatttcatgctgttccagcaggtaattcatatatctgcgcacagtcaccctggacaggtgaatctcctccgcgattttttcactggtgaggggttctcctgtgtgctccttcatataatccacgatgagcttcaaggttttctcctgaagacccttggctaaaagggaggactttcccgcagaggcacaggaagcgtggagaagctgatccagctcttcctgggagacggggcgggagcgggagagcatttcctggtgctggataaaaagggccagggcgtggttgaagcgcatgtattcaaagggcttcaccaaatagtccagtacccccagggacagcagctttttcacctgctggggatcgttggcggctgtgaccacgataatgtccatggactgattttgacggcgcagctcctccagaagggtgattccgtccatcacaggcatatacacatccataatggccaggtcggccttctctttttccagaaagagaagagcgtcctggccatttgtgaactggccggtcaccttgagatttttatttagttctacatattgtttgttgataaaggcaaccatggggtcgtcttcaatgatgatcactgagtacattggtttcttctcctgttatggtgacagtgatggaggtgcctacgccttcttcactttctacagtaatagttcctccgaaacgttcggtgagatcctttaccagatacagtccggtgccgcggttttccccctttgtggaaaagccccgggcaaagattttctcctgaagttctttggaaatgccctttccggtatcgtccacggaaaggatgcacccggttttccaggtatggatgcccacgtcaatttcttttacgggagaggtctcccggttcagttcttctatggaattctccagaagatttcccaaaatcgtaatgtaagcatctaccggaaggttcagggtggagtcgctgcaggcgctgtcaggctttagggtaagccggattcccagctctttggcccggatgatctttccaatgagcagggcggcgatggcagatacctggatatttcgggatacctggcttacggcctgggtggataccaggctggtgtttaggatgagctccgtgaccttctggggctgtcccatttcgatgtagcccaggattacatggagcttgttcatgaattcatggttaaatgcacggagggtatccaccatatatctggctccggtaagctcctctgccagacgggtcacctcggtgcggttccggagaatggaaacggcgccgatcacctgtccttcttctacgatgggaatggtgctggacaggatgtttttgtcagataccattcggtccagatcccaggaagccacctgaaattcctcttccttcagatggggtgcctggggaaaaatatcggtgatcttcataccgggagcaggcagttccttcagcttcagcatggcttgggcggatttattcataagaaggatccgtccgtttttatttacgccaaaaacgccttcctccatggcatccatcacctctgcacgctccagatacattttccggaactgttccgggttgtagccaagcagggtgttcttcagcttcagataaaagtggctggccagaaggctgcccaatgccaccaggatcaaggcagcagtgaaaaataccaggatcacctgctggcgcagcttggcaatgctggccgtgagcacggataccatcacaaagccagtctgttttccctgaaagctctcaacaggatagaaggctctgcgctgacggcccagggttcctgtaccggtggtaatgtaaggggaggagccctccaggatggggccttcgtctccgcccacgaaactctggccgatccgggtgctgtctgtgtgatacaggcggatgctgtccagattgcagatggtgatcacgtccgcataggaaaggttgtgggtgaggccgtccagatagtctttcagatcctggggcgcactgcctttttccaaggcctgtcttacctggggcagggtggagaccacggccgccagattgctgatgttgccgtccagggatttttgcttttcatgaagactgaaatacaaagaaacagctagggacaaaaggatggcggcgatcacggatacaatctgaaacaggtagagctgttgctccagggttcttttcttcttcacggcggattcccccttttttttcattttaatataggaaaatgcagaaggcaatggagttttcattttttttagttacaaaagatttaggataatttcacaagattttcttttggggaaggctgggttatacttgcgttacaaaggaaatggaaagacgaaaccgtgagaacaaaattatgaggaggaatttctatgaattacaatgagctgagtctgaaaatgcatgaggaacacagaggaaaaatccaggtcacttcaaaggtggcggtggacagcagggatgctctgagcactgcctatacaccgggagtagcggagccctgcaggagaatccacgaaaaccgtgaggatgtgtatcggtacacggcaaagggaaatctggtggcagtggtcacggatggaacagcggttctgggactgggggacattggaccagaggcgggaatgccagtaatggaaggaaaagcggtattgttcaaggagtttggaggagtggatgcatttcccatctgtctgaatacgaagcatgtggacgagatcgtggacactgtgaaacggatcgctcccacctttggggggatcaatctggaggatatttccgcacccagatgctttgaaatagaacgcaggctgaaggaagagctggatatcccggttttccatgatgaccagcatgggactgcggtggtggttctggcagggatcatcaatgccttaaagcttttgggaaagaaaaaagaggactgccgggtggtcatcaatggctccggggcagcggggatcgccatcggcaagctccttcacagctatggacttggagagattattttctgtgacagaaaagggatcataacaaaggagaacgcagggaattctgcaaagcaggaggttgcgtgcttttccaacaagcagggactcacaggaaccttaaaagatgccatgaagggggcggacatttttgtgggggtatctgctccgggcagtgtgaccaaggaaatggtggcatccatgaattcccaggcctgcattttcgcaatggccaatccggttccagagattatgcctgaggaggcaaaagaagccggggccaggatcgtaggaaccggacgttccgattttccaaatcagattaataacgtgctggtatttccgggattgttccggggcgccttggatgtgagggccaccaagatcaatgaggagatgaaggtggcagcggcagaggctattgcggcgatcatcacagagggagagctgaaggaggactatatcatcccagacgcttttgacagaagagtgggcagggccgttgcccaggcagtggcaaatgcagcactggaaactggagcggtaagataattggaatgggaaaacagcggtaaatgatggagaggagaaggaatgatggatggatatggagtaaaaagtgcagcgcctgtacaggaaggatctctttggaaaagcatttgcgaaatttccataatgggaatcagtcttcctatttatgtgggaatggcggtggtggtatttgcagccatgaagcttcagtggctgcctgcggggatgatcggagcccttgcggtgatgatggtatttgggggcttatttaatgtgatcggcaataacctgcccattgtaaagacctttctgggcggcggagccattgtatgtatctttgcctcagcggcactggttttcacaggggtgattcctgccaatgtggtggagaatgtggatacctttatgaataccactggatttttgaatttttatattgcggcattgatcacaggaagtattttgggaatggacagaacgctgcttctgcgggcggctcttcgcttccttccggtggccttgtgtgcaatgaccatggccattttggctgtgggtcttgtgggcatgctggtgggctatgggtttgtggatgccattatgtatgtggccattcccatgatgggcggcggaatgggagccggcgtggtgcccttgtccggcatgtatgcagaggctttgcaggtggactctgcccaggtgatatccaggatgatcccggcttccactctgggaaatgtgatggcgatcgtgggagcgggacttttggcaaaattaggtgaggtgaagccttcccttactggaaacggaaagcttatgaaaaaccataagtctgagatggaggagaccaagaaaagtgaactgtcccttcaaacgctgggaatggggctgatggtttccatgctgttctttattctcggcacgatcattagtaaatttatcccctccatccacgcctatgcctggatgatcatcctggtggctctttctaaggcggctgggatcataccaaagaaatttgaacatgcggcccagcagtggagtcagtttgtgatgaaaaactggaccagcgcccttcttgtgggaatcggcatttccatgatcgatctgggggcagtggcaggagccatctctcccatgtacctgcttctggtgcttgtggtggttggcggagttgctcttggggcaggcctggggggacgtatggtgggattttacccagtggaatcagccatcacggcaggtctttgcaccacaaatatgggaggaaccggagacattgcggttctgtctgcggctaagcgcatggagctgcttccctttgcacagatctccactagaatctgcggggctttgattctgatcgtagctagtatactcactcaggttttattctgagccggttgatcaaaataaggataccgattatgaaacaatttttacagagtcgattgtatcagatagcaggctggctggagctggtgctggcaggaattattgcaggggtgatcgctgtattggcctgccttatggtgaaaaacatttttggagacaggggttttctcctggggcaggatgcgcttactcagtttctggagtctgctttgggactggtggtgggcattgagtttgtaaaaatgctggtgcgccatacccctggaaatgttattgaggtactgttgtttgccctgtccagacagatcattgtacgccattcggacagcctgggcactcttttggggattgcgggaattgcggctttgtttgccaccagaaagtttctttttgtgaatttcgacgagacccggcggtccgtctaccgggccagtcagaaggtacatatggtaaaccatctctgtcaggtggagatccctcaccaggaagggaatacgctgcgggaggtagttgtaggagaattggaaaaacagaagcagaccatcggggtgggagcctgtgtttcctttcagggagtggcgcttagaattgccaatattaccaatgggattgtgaccagggtggaagtgatcaaagaaattatttaggaatctagtaacttgatataaagcacgcaaaatattgcgtgctttttctgcgtgtgttataatgactttaacgaaatttttataggaaaagaggaatgaatgttggctgtgaccatacaacagattgcagaacaggcgggagtatccagggggacggtggaccgggccctgaatcatcgagggcggattaatccggaagtggcggacagaatacagaaaatcgcagacgacctgggatatgtgcataaggccaggaaaagacagaagagctttccagacaggatcaaactgggggttgtcacacatctttcaaaggcctcttttatgctggaaatcaataggggaatccaaaaggcaaaggaagagctgaaggagcagggggcagaacttgtcataaaggagatcgaatccgtcagtgaggcagagcaggtaaaagctgttcaggagctgctggaggaggaaatccaggggctggccatcatgcctgtggagggagaacggctccggggacggttaaactggatggccgatgagaagaagcttccgattgtcacctttaattcagacattgtgggaacgagaaggggctgctttgtgggaatggacaaccgaaggagcggacagacagctgcagggcttctagggatgcttaccagggggcagggaaaaattctgatcatcacggggtatttcagcagtgttgtaaataattcccgggtggacggatttgtggaggagcttaaaaaaagctatcctacccttgaaattgcaggagtccagggcagcttcaatgacaccagggagatggaacacattcttgtgaatgccatgaaggatatatctggaatcaatggaatctatgttgtttccggaggacaggacgggatccgggcagcctttgaagagctgaagctggaccacaggccctatgtggtcatttacgatcagacgcccaagaatgaaaagcttctgcaaaagggactggtggattttgtcattgaccagaatggatttgagcagggataccggccgccctggcttttgctggatcagcttaggaaaggccaggagccagagcaggaatttttatatacaggaattgatattaagacaaaatataatctataggacaaggataactgggagagtggaaaaatggggattcagagggttttcacaagggggatcgcaatggttcttctgggcagtctattcaccggctgcgctgggaaaagcggctatatccagcagacggaaacctatgtggtgggagttgtgacaaaatcaagtacaagtgaatattggatgtctgtaatgtctggaatggaggcagcggcaaccaaaagagggatggaggtgatttctctttccccggattctgagctgaaaaaggatgtgcaggacaaacttatcagaaagctcatagaaaggaaggtggacgcgatcgccatctcacccattgattcctacaatgccccggaatatctggaggaattaaaggagcagggaattccttccgtggcctttgacactggctttgaggacggagagattccctatgtggggattgacaataaaaaggccgggtatgagctggccaagagcctggccaaggccatggatcataaaggccaggtggggatcgtcaccggagatctggagcagatgggccatagagaacgaatggagggcttccgggagtatatagatgcccagccggatatgaaagtggcctttgtggaaagtggttatgccaatcttcagatgtctgagaagaaggtgcgcaacctgatgagccaatatcctcaggtaaaagggattttggccaccagtgcggtgactgctctgggacttgcacaggaaatgatggattcaggaattcaaatcgtcacggtggacgcccagaatgattccctccaggcactttcccagggccgcctgtgtgctctggctgcacagtccggctatgagattggttatgagaccatcgaatatcttgagatgatgagaaaaggggaaagcgacggtcaggaccgggtgctccaggctcctattttgacaaaagagaatgtggatgcctatgaaaagaagaattagaccagggaagatggatcgcatctcctggtttctgccaagtcagacgaaaggaatgtgaaagtagtatgaaaagtattcgcagcaaggtactggcatctattctgtttgttaccctgttcacggccctggcccttgctatggtgttttatggaaaatcctctcagatgatccaggaaaattatgggacccttctccaccagagagagcggcttttgatggataccatagacggtctgctgaaggacgtgtgctacattaccatcaacgcctcctgcgacgaccagattcaggaggatacacgcaggtatggcagcaataaggaggaagagctgctggaaagcctgtctgaacagctgcgcctttttggcaagcagaattcttccatatcctccatgtatcttctgcttcctgaggaatcagtgatcgtcacctccatggattatccagtatacacaaggcatatggaccgggggcttatggagaaggcggcagaaattgcccaaaagggctccggaccggtgatcatggaggatattgtacattccggctcaacactgctgtcctttttggagcctgtggaggatgaacaggggaaggtgctagggtatgtgtgtgctaatattgaggaaaaccgtctgtattatgactattttgatgatccggcaaatgaaaacctggatcagatggttctgctgaaccaggggcagattgccgcatccctggatccttttaccatggggactgcctttgaacagaatgagtcttacaggcagtggctggacggaaccgatgtgtcaggagcagatgaaaaatacatttatagctattgtcagggagggttttctggctgcggtctttttgtaaaggtggagaaaaaggtcatcctcagtgatctgctcaccatgcgcaaatatattttcgggattatgcttgcctttgtcctgctgtcttttgttcccgcctattacataacccatgtggtttatcagcccctgaaaaagcttacccagaccatgcaccgagtatcggagggaaacctgcagacccgggcagagcctgcctcccaggatgagatcggaaccttggccagggagtttaaccggatgctggaccagattgaaaagctcatccatcagctcctggaagaagaacagattaaaaaggatgcggagctggaggcccttcaatatcagatcacgccacactttatgtacaataccttaaactccataaaatgtgcagctctgatcacgggggagacagagctgggaagagtcattgaagactttgtggagcttcttcaggccagcatcagcaaaaaaggagcatttatgactgtggcggaggaagtacagattctggagcattatgtgcgccttcaggaatttcgttatggagagactttccaggtggagtatgagattgccccggaggcacagcagtgtctgatccccaggctgcttctgcagcccttggtggagaatgccctgcttcacggcatggatattaagcagagacagggaaggctggtgatccaggcccaggttcaggaggctgttctgtatttgaaggtaacggataatggaagaggtatgagcagggaacagattgaaaagctgcttaccaccaaggcaaaaaagacaaagggctttaccgctgtgggcataccaaatatccgggaccgcctggcattgtattatggtgaaaatggtaaattaacttatgaaagcagcggggaaggcaccacagcaatgattcatctgcctgcagagcaaaaggaagaataggtacgcgctatgaagaaaacaatcttggtcgatgacgattatctggtgagaagttatttaaaaatgctgccttcctgggaacaggcaggttttcagatcgaagcggatgtaagagacggcgaggaggcaatggcccagctggagaaaaatccagcggatctggtggtgacagatatctccatgcctcttatggatggtatccagctcattaaaaatatccgtaagcgggacaaggagatctatattatcgtgctgagctgtcacgatgattttgaatatgtgaaggaagccatgcgggaaggggcggacgaatatgtgctgaaaaataccctggatgaaaaaagtctctacgcactgcttgtgaacaccaaggaaaaaatgcagcagaggcagtctgatgctccacagcccaggggcgtggacagccagggccaggacaggcatggaaatggggcctatgcattttttaaccaggtgctggccggcactttgaagggagaggagcgccagcgccagcgcatccaggcagggatccgggggctgtatcagaacagtgcggttgtggccatggccttggatgcctgggaggatacggaggatccttgggctgagataaaaaatgagcaatattgcctagaatttttaagacggctgcaagaggagatggaaagggtaagacagggcagtgagattgagcatgaagtgatctatctgggaaaaggcgtgttctgttgtttcctggatctgtctggcatttataaaagcagcgtcatgcatcaaaagctgaccactgctgcctctgcctgttataaattctgcagcagggaggaacattcctataaaatcggggtgagcaatgtgtgtattggggaccaggccctgcgccaggcctatcagcaggcacgcaccatgctgaagctgggtttttatgatccacaggagatcgcctattatgaaggaggcaataaggtgggtacccagcttccaaaagaagcagaggagctttcgggccagctggatatactgcgctatggaaacagtaaggagaagtttctcaaggcagtaaaggaggcggagaaagcctttcgccgggagatgacggacagccgcctggtgatccagtggcttcgtgcactggagcatgcaatggggattcgggacgggaaggactatggaagcatcagtgagatgggacaggtgctgaagagactggaagaggatgcccaggctgtgtttgaaagccagactgaggatattcctgagagtgccggccgggcggtgcgcattgccgcagaatttgccgcggatcattaccgggaggctattggactaaatgatgccgcacaggcggcaggggtgaaccctacatacttaagctatctgttcagccaggagatggggctgggattttccaattatcttctcaatcaaagaatgaaatgtgcccagaagatgcttcaagagaccagtctgaaggtgcgggacattgcagaaaaatcagggtttcatgattatcactatttttccaaaacctttaaaaaaatcacgggggtaagcccggcggaatatcggaagcaaaagtgaggagtggtttatagaagaaaccaggggcggcacaaggaatttcaaggccccataatcaagaaagaaattcaaacagctatggaaagtaaaagaatccatggctgtttttttattacataggaaagttcatagaactttcctatgtaataaaaaccctccgggggatgcacacaatgtgccagggaaagctgcttcgcagctgcacattggcgcacaaagctgccaagcccctcatgagtgaggggatggggagttgaagcgggcttgcccgctttgtttcacaaaaattgcgtgataaatcgcgtgcaaatataaaactgcgtgctatagcgtgcttgatgacggaacctaaaaataacacccaaagataacaccataaaaaggaccctaaaaaaagtcccccaaagataacctcacaaatcgaaagattataccgatgtttcccaagcccaaagcttgttaagatgtaatcacaaagaaaacacgagaaaaaataaaaaggaaaagaggaaaagaaatgtttgacaaaaacaaagtaaaactgggaattgcaccgattgcctggaccaatgacgacatgccggatttggggaaagaaaatacatttgagcagtgcatcagcgagatggcgctggcaggcttcactggttctgaggtaggaaacaaatatcccaaagacacgcaggtgctgaaaaaagcattggcgctgcggggaatggaaatctgtaaccaatggttttccagcttcctgatcacaaagccctttgaacaggtggaagaagagttccgggcacagctggcctatttaaaagaaatgggggcaaaggttatcggagcttcggagcagagctacagcgtgcagggaatcacagacatgcctattttcggacacaaatacgtgatgaaccaggaagagtggaaggtattctgtgaggggatgaaccggcttggacggattgcaaaagaggagtatggaattgcccttaccttccatcatcacatgggcactgttatccagaacgcagacgaagtggagcggatgatggagaacacagatccagaatatgtaagcctcttatttgacaccggacactttgcctactgcggtgtggatcccctggaaatggtgaaaaagtatgcccacaggatcaagcatgtgcatttaaaggacatccgcagagaattagtggagaaggtaaaggcagaggatttaagctttctggatggtgtgcgcttagggacttttaccgttccaggagacggctgcatagactttgatcctattttcaaggtccttgaggacacgggatacgaaggctacatgctggtggaggcagagcaggatcccgccaaggccaatcctctggaatatgccatgaaggcaagaaaatttattgcagaaaaaactggtttatgatcaagttcccacaacaatgaaaaaagaaacgaaatatatgtgtataaaaaaagcagattggtaacatcaccagaaattataaaaaagaaaaaaaggagaagaaaattatggtaaacgtaggaattattggagcagggagaattggaaaggtacatgtagaaagtatctgcacacaggtggcagatgcaaaggtgaaggcactggcagacccgtttatgaatgacagcaccgctgcctgggcaaaggagatgggagtagagaaggtgacaaaggattaccatgagattctgtcagatccggagataaacgcagtgctcatctgctcatccacagatacccattcctccatttccgtggaggccatccaggcaggaaaacacgttttctgtgagaaacccattgaccatgacgtggcaaaaatccaggaggttatcgcggcattaaaggacagtaaggtgaagtatcaggtgggctttaaccgcagattcgaccacaattttgaagctgtgcaaagagctgtggcagaaggacggatcggcacccctcatctgatcaaggtcacctccagagatccggagccccccagtccggaatatgttaaggtttccggagggatgttcctggatatgaccattcatgatttcgacatggtgcgttttctggctggctgcaatgccacggaggtctatgtacaagccgctgttttagttgacccggccattggagaggcgggagacgtggacactgccgtgatcactttgaagatggagaacggggccattgccgtgatcgacaactccagaaaagccgtgtacggatatgaccagagagcagaagtatttggctccaaagggatggtggctgtgtccaatgacgcggcatccacggcagttttcagcggcgagcagggagtcacaggagaaaaacccctgtacttcttcctggagcgttacatggcagcttatgcaaaggaagtgaaatgtttcatccaggcaattgagaacaatacagacacccctctgggagtcctggatggtctggagccagtgcgcatgggtcttgcggccaagaagtccctggaagaacaccgccctgtaaaaatagcagagatcacagtctgatcagcacagaacaaagacagcagagacaagaaaaggcctgtgagttgtaaagaaacagcttgtgggctttttccttccaaagctgtctggaaaaggagagagagatggaaagaaaggatataaacggaaggctttcctggcttaccaggatatcttatgctggcggagacgtggcatgtaatgtgatctttggcatggtgggaaccctgctgacacttttttacacagactatgtggggatcaatcctgctgttgtgggaatggtcatgctgatctccagacttttcgatggcgtgtcagatatggtcatgggaatcattgtggagaaaaccaattccaaatggggaaaatccaggccctggatcttatggatgagcataccctatgccctgtccgctgtcctgctttttgcagtacctcataccactgggattgtccaggccgtgtatatttttgtcacctataacttctgtacaacggtgtgctacaccgccatcaacctgccatacggaagcctgtcagccatgatgacaaggatatccggggagagagatatgctcagtgtggtgagaatgggtctgtcacccttgggaagaatcatggcagtaacctgtacccttcccctggttaagctttttggtgacgaccaggcagcctggatcaagacaatgtctgtttgggcagttgtggccctgcttttgttggtgatctgttttgcaagatgtaaggaaaccgtgaagatcgcagcccaggagaaggcagagaaggtccccctgaaaaaagggctgaaggccctggcatccaaccaatatttttgggcagtccttgttctgtggatgcttcagagcgtatcctttggtatttcaggaaccattcttccttattactgtaaatacattttccacaatgatacctggatgtacagcgccttgtatttaacagaaaccttggttttggtggcatgtatcttcggctgtgcgcccctgatcaaaagatttggaaagagaaatgtggctctggccggcgcctttatcgccctggccggacagctcttattctttatgaatccctacagctttcaatggatgaccatgagctgtgtcaccagagccatcgggcttgcaccccttaatgcagtggtctttggaatgattggggatgtggtggaattcggacagtggaaaacccacatccgccaggaaagcctgatctttgcaggggggtccattggcacaaaggtgggggccggcgttgcatcggcagctatgaccggactgttgtccctggcaggatatatcagctccgctgcaggtaccgtcattcagccggaccgtgcactgaacatgatcgtgaacatctataagggcggtccccttattgttgccgccgctgccatcgtggtgctgtctctgtacagactggacggaaaatattccagcatcatgacagagctcacccaaagagaggcaaggggagagctgtaaaccacacacaatcacacaggagtagaaaaggaggaaatgtgatgaaatatatagattttgatgaatccagacctatggatctgatactactgggacgggtggccattgattttaatccggcctacaaccagcaggtaaaggaagaatttaagcctttaaaaaaggtacatatgtttgaaaaatttgtaggaggttctccggcgaatattgcagttggagtgaccagacacgggctgaaggcaggctttatcgggaaggtttccgatgatcagttcggtgaatatgtagtggattatttcaatgaacagggaattgatacctcccatattaccaagtgtaccaatggagaaaagctggggcttaccttcacagagatgctgtcccccagtgaaagcagcattctgatgtacaggaactgcattgccgacctgcagcttcatgtggatgacattgatgaagcttatattgcccaggcgaaggccatcctgatatcaggaactgccctggcagaaagcccctccagggaggcggccatcaaagcggtgatgcttgccaagaagaatgaaacgaaagtgatcttcgatattgattacagagaatataactggaaaaatacagatgaaatttccatctattactccattgtggccaaggaagcagatattatcatgggctccagagaggagtttgacctgacagagaaattgatccagcctggtatgacggatgaacaaagcgctgccctgtggaaggaatatcacgcaaaaattgtggtgatcaagcatggaatgaagggctccactgcctacacctgtgacgggcagcagtttagtattaagcccttcccggtgaaggccagaaaaggctttggagggggagacggatatggctccggattcctgtacggcctctatcagggctgggaagtcattgactgtctggagttcggttccgcggaggcttccatgatggtcaggagcaacaactgttcggactcccttccgggaccggaggaagtgcacgcatttatcagggaagagaaggaacaatacggcgagatgatcgccagggtttaggaaaggagaatggagatgactaagacagtgaaaatgacagtggcccaggctattgtgaagtttttagataatcagtatgtatccatggatggtgtggagacgaaatttgtggaaggtttttttaccatatttggacatggaatcgcagtggggctgggggaagcactggataccgacccgggtcagcttcgggttttccagggacgaaacgagcagggaatgtgtcacaccgccatagcatttgccaagcagaataaccggagaaagattattccctgcgcatcctccgtgggtccgggggcggccaacatggtcactgcctgtgccacggccacagtgaataatatcccccttctggtattccctgcagacacctttgcatccagacagccggacccggtgcttcagcagctggagcaaagcagcagccttgcagtgaccaccaacgatgcctttaagcctgtgtgcaaatactgggaccggatcaccagaccggagatgatcatgaccgcgctgatccaggccatgcgggtgctcacagacccggcagagacaggagcctgctgcattggactgtgtcaggatgtggagggtgaggcctatgagtttccggagtactttttccagaaaagggttcacaggatcacaagacctgtggcagtggaagaggagctggaggatgtggcccaggtgatcgcccaggccaaaaagccgctggtcattgtgggaggcggcgtgcgttactcagaagcaggggagacagtggagcacttctgtgaagagttcaacatccccttcggagagagccaggcaggaaaaagcgcctgcatttccagccatcccctatgtctgggaggaatcggagtcactggtacctatgcttccaacactattgcaagggaagcagatgtggttattgccatcggctccagaatgtccgactttacaaccggatccaagcgtctgttcgccaatgaaaatgtaaaggttgtgaccatcaataactgcagatatcatgcttataaaatggatggaataaaggcagtgggagacgccaaagtaacggttcaggcactggccaggaagcttcgaaagaggggataccgctccgcctatgtgaatgaaatccgggaagcaaaggctgtgtgggagcaggagatggagcggctggcagggatcgaatatacgggggaggattttgaacctctgatcaaagccagagatcccagaaccattcctgagtttgtaaagcttaccaacggaaggatcacacagacagcagccctggctgctatccgcagagtgatcgaccaggatgccaccattataaccgcgggaggatctcttccaagctgtatgcagcgcatgtggaccacagacaagcggggcggctaccatgcagagtatggatattcctgcatgggatatgaagtggctgcaaccctgggagttaaattggctgagccggacaatgaggtgtactgtgtggtgggcgactccagcttccagatgctccacagtgagatcatgacaattatgcaggaacgccagaaggtgaatattcttgtgtttgacaactgtggttttggctgcatcaacaacctggaaatgaaccatggtatcggaagcattgccacagaattccgttatacagacgggaagaaaccctgcggtgaattaatcccagtggattataaaaaaattggggaaggctatggcctgaaagcctatacctgcaggaccattaaagagctggaagcagccctgaaggatgcaaaaggccagaagaaagcgtgcctttttgacctgaaagtaataccaaaaaccatgaccgacggatacgaatcctggtggaatgtgggaattgccaacatctcccagaaggaatccgtaagaaaagcctgggaggaagtccgggaaggcagagcccaggccagagagtattaaaaatcattgaaagacagcacaatgctttcacaggaggataagaaaaatgggaaaagtattcggttaccccagctatgatgaaacgggtgaaatgatccttacaacttatgataatgagtataaagacatgcttatggatatccgggtgtaccggatgaaagcgaaagaatccaggaccttcttccgtactggggaggagatggccctgctcctgttagccgggcagatcacctatgcctgggagggaaattccaggacggtacagcggcaggatgtttttacacaaggtccctggtgcctgcatgtgtgtacccaaaaagaggtcacggtgacagcacatacagacgttaatttcctggtacaatgcacccaaaatgacagggaatttgaaagccgtctgtacgaaccaaaggatgcgccctgggggtattcctgtgtgggaaagtttgggaatgtggcaaagcgccgggtgaacaccattttcgaccatgacatcgccccggcctccaatatggtcctgggagaggttttgaatgatcctggaaactggtccggctaccttccccacagacatccgcagccagagacctatttctttaaatttgaccgtccggaaggcttcggggccagctttatcggtgaccaggtgtacaaaagtgtggacgagagtttttccgccattccagggggagaactccatccccaggcggcggcgcccggattccagatgtacacctgctggatgatccgccatctggaggggaacccctggctgcagacagaccgctgtgaggatgaacgctatacctggcttcacaatgcctgacagcagcacattcacacagacctgcccccacacaggagagcttctgtaaggagggcaggtggggagtctttaagaaatgtgagaaaataaaacaagtattccagcaaggaaaaatagaggagtgaaagatatggcaagagaatttatcgtaccaggacagattatatcaggagcaggggccttggatatggccgaaactgcattaaaggaaatggggaaaaaagcattgatcgtcacagacaaggtgatgatacagctaggcaaatgtgccaaagtggaggcagctcttaagaatcagggaatttcctatgttgtttattcagagatcctaggggagcccacggaccagatgatccatcagggattaaaggtatatcgtgaggaaaattgtgactttctggtggctcttggagggggaagtcccattgattccatgaaggccattggctcactggtagtaaatgggggggagatctctcaatacatgggaaaagtcattgacgtaacgatgccgcccatggcagctatccccacaaccgccggaaccggctctgaggccacacagtttaccattatcacagacacgaaaagggatattaaaatgctgttaaaagggaaggtgctcatgccggatctggcagtgatcgacccccagtttaccatgacagccccgcccaagatcacggctgccacaggactggatgccctgtgtcatgcagtggaagcctatacctccaggaaggcacagaccctgtctgacagctttgctttatcggcagtaaaacgaattttccagtacctgcccacagcctttcatgaagggaacaacgaagaggccagagttcaaatgtctgtggctgctctagaggcagggatcgcatttaacaattcttcagtaactctgatccatggcatgagccgtcccattggcgccttattccatgtggctcacggcctgtccaatgccatgctcatgaaagaatgtctgggctttgcccttccgggagcctatgaccggtttgcagatctggcaagagccatcggcgtggcggatgcagcgaaagacgatgagacggcggcccggaaattcttggctgcagtggaacagatcacggcagagctggaaactcccaccttggaagaatttggcattgacagagagaaattcatgagtgttgttgaaaaaatggcctttgatgcaatggacagtggaagtccccagaatacccaaagaccagtttcccagatagatgtggagcagatgtaccggaatctttggaaataagaagttcctggaagcccaggagagaatccgggatccacacgttcacagaaaaggaaatccatggagagagaacagagtatgaaccttacaaagaatcaaaaaagacaacgcttattgaccatgctctttggggcttttgcaatcttctttaccggttatcctcatgtgtggtcggtgtaccagccctatgtgatggagctggcagggtggacccagagccaggcatctatatgcttttatctggctcttggctcctttgtattcgggaatattgtgggaggaaggatgcaggataaacgggatccccggctgaccgtgttcctgggaggagggatttttacagcaggaatactgatctcagcctttcttataatcccatcccctctgcccatttattttacctacggaatcatgcagggatttgggcagggaatgatctataccaccattattgccactgctcagaaatggtttcccacacggactggatttgcctctggggttgtggttacagccaatggattgtgcggctttttcctggctcccatcagcaggcagcttctggaaatgggagggccgaggctggcatttcttctcattggtggagccatcggcgtctcttggatcttatgcagcctgttcttttttgtgccggataagaagtggcagcaggaggcagaaaaggagatgcatccaggggcaaagggaggagcacagccaggcgccagacagtatacctcaggggagatgatgggcacaaagagcttttattaccttctggcaaccatgcttttcggactgatctcctatttcatggtatccccggtgtcacagacttaccagattgaaatgggagttccggcctcccttgcagtgagcgccgtcatgcttggatctgtggtaaatgccggcaccaggctggtgcttcccactttggcggacaaggttgggaggattgtgtgtatcaagggggtgctggcagtgtctgtagcagccatggtggttttaagtgtgtccacatcttatatgacaaccgctgccattgtggttatgtatggatgctacggagggatcatgggaagctttccatcctttaccagctcaatttttgggatggagcattccggagaaaattatggatttgtcatgttcggcattgtcattgccacctttggggcaccggtgatcgcaggcatggccacaggaaacggctatggaatgcaggtggtatttggaataggtgcagtgtttgcggttctggccctgggctgtctgctgatgctgaataaggaactgaaaagatggaatcggaaacaggaggaacaagaaaatggcattggtgacaatgaaatccttgctggagcaggcaaagaataaccacatgggagtgggggccttcagcgtaggaaatatggaaatggtaaaaggggctgtccaggcggcagaggagcaaaatacacccattattctgcagattgcgcaggtacggctgaaacattctcctttggaacttatgggacctatgatggttcaggcggcaagggaggccaaggtggacgtggctgtccatctggatcacggtctgactttacaggtggtgaaaaaagcgctggacctgggatttacttccgtcatgtttgatagctccgcctatccttttgaagaaaatataacccgtacctgtcaggtggcagagctggccaaaaactatggtgcgactgtggaagcagagctgggcctggtgggaggaagcgaggacggaagctgtgatcacgggatacggtgcacagatccaaaggacgccagaatcttttgtgaggccactggaattgacgccctggcagtggccatcggaaatgcgcatggcaattacccagtggcccccaagctggcttttgatgtcctggaggaaatcgcaaaaaacacaaagattcctctggtccttcacggcgggagcgggatcacggacgatgattttagaaaagcgattgccctggggatcgttaaggtgaatattgccaccgcaagctttaacagcctggtaaagcgggcagaagagtatttaaattcccagggaccccataattatttttctctgaatgaggcaatggtgagggggacttatgaaaatgtcagccatcatattcaggtattccggtgcggaaaatgatagagggcaattaccagaagcgtatccaaacaggcagccagagcagaggatagaacaggcagcctctgtcagtcagacatgacaggggcggcctgaaagcgcaggattgttttttgtctgctttcttctacccggctggcattgcttaaatagatttcccgatggcaggatccagtgcgcataaggccgttttgcagggcgaattcctccatcttttggaaggaggcaggctcctggtcataagaaccctggtgcaggatttgtatgcaggtaccatcctccatggagtcaaaacggatcttatcatagaatgggctgggttttttcttttttaccttttcaagagctgcctggaagagtgtttccgtgataaaatccggctgccggatcataatggtatagaccagacgatcctttaccagggtcccatcccattcttcctgggtccatattccctccaggggatagacagtataatctgtgacagcatgttcgtcctgtgtctgggcggcagaagctttatatgccattttaattccgtaggccagggaatacagcgccgataccttattggaaaattcctcttcgttgggattcccctttccgttgatcataagataggtttgtgtgggaacctggaccagggcaggaaccggctttgccccatatagatttttctcttgctttctccattcgtatttcatgtgcagcctcctttattttattcttaattgtgatgatacacgcacaaccctgacatcagttgtcaaggttctttttattttcaggaaaattataaaacaggataagaaacaagttgacaaggagaaccaccaggcatataatgtgactataccccggtggggtgttaagttaaaaaggaattatctacagaggaggtctccatgaaagcagataaacaaaaaatcacaagattgctgaaaacagccaaaggacagatagacggtattttgaaaatggttgaagaggaccgttactgtatcgatatctcccagcagctcatggctacagaggctattttgaataaagtaaacaaggaaattcttacctctcatttgaaaaactgtgtgtcccagacagagagtcaggaggaaatggaagaaaaaattgatgaattagtatccatgctgggtaaaatactaaaataaagaaaggagccaaggatgaaagaaaattatgatgtgacaggcatgacctgttcggcctgctcctcccgggtggagaaatgtgtcagcaagcttcccggcgtggataaggttgcggtgaatctgcttaccaacagtatgcaggtggagtatgacgataaaaatttaaaccagcggcagatcattgacgctgtggtaaaagccggatatggagcttttccaaaggatggagggcagcaggtgacaggaagggccaaggcaaaagcggaagtgcccagagaaaaccctgtggagcagcagatgaaggagatgaaattccgtctcattgtgtctgtggtgctgctttttcccttgatgtatgtgagcatgggccacatggtggggcttcctctgccaggctttcttagcggtgtggaaaatgcagtgagctttgcttttactcagttcctcatctgtatccctattttgatcgtaaataagaaatattttataaagggttatcagaccctgtttcatctggcccccaatatggacagtcttattgccatcggctccacagcctctttggtgtatgggatttttgccatttaccgtatgagctatggcctgggttccggaaatatggagctggtacatttatattaccatgatctctattttgaatcagcagccatgatcctggcactgatcaccgtgggaaaatatctggaggcccgttccaaggggcgtaccagtgaggccatcaccaagctgctggatctggctccgaaaactgccattgtagaaagagacgggcaggagacagagatccctgtggaggaggtactggtgggtgataccctggtggtgcggccgggcatgagcattcctgtggatggttttatcacagagggaagcaccagtattgatgaggcggccattacaggggaaagcatcccggttcacaagcaggtaaatgacactgtgatcgcggcaaccatgaataagaccggatttatccgttttaaggccaccagagtgggagatgacaccacgttttcccagattatccgtctggtggaggaggccagctccagcaaggctcccattgccaagatcgcagacaaaattgccgggatctttgtgcctgcagttatggggatcgccctggtgactgccattgcctggctggtatcaggagcaacctttgaatttgccctttcctgtgccatcagcgttctggtaatctcctgcccctgtgctttaggcctggccacaccggtagctattatggtgggaactggcaaaggagcggagaatggaattttgatcaagtccggggaagccctggagactgcccataacattcaaagcgtggttttggataagacaggcaccatcacccagggaaaaccagtggtcacggatgtgcagaccgtggccccaggcacagagtttctggagatcgccgctggtctggaggcaaaaagcgagcatcccctggcagagtccattctggaatttaccaaggaacggggaattaccccggccagggtggagaattttcagtccattccaggaaaaggcgtgaagggccagataaagggaagctggtattttgcaggaaatcaaaggcttatggaggaggaaggaattgtcctggggcaccatcaggacagcctggaccgtctggccgatgaaggaaaaacccccatgctttttgccagagaaggggagatcctggggatcatttcagtagccgatgtggtgaagccaaccagccgggaggctgtccaccagctaaaggagctggggattcaggtagttatgctcacaggagacaataagagaaccgcagaagccatccgccgtcagcttgacattgatacagtgatcgccgaggtacttccccaggacaaagaacgggagatcgtaaggcttcaggagcagggacgcacggtggccatgatcggggacggtgtgaatgatgctccggcgttggcaagagcagacgtgggtctggccattggggcaggaacggacgtggccattgaaagtgcagatgtggttcttatgaaaaatgaccttctggatgcggtgacagccatccgtttgagtaaggcagtgatccggaatattaagcagaatctattctgggcatttttctataatactttgggaatccctgtggcggccggtgttttctatacagcctttggcttaaagctcaatcctatgatcggagcggcggccatgagtatgagcagtattttcgtggtaaccaacgcccttcgcctgaaagggttccgggtatccaaaggagagcagaatgcacgcctggaaggacaggagaaatttacagtgcatatggattctaatgaggaagcaatgcttcaaggcaattctatagacaggaaaaacgaaaaggaggaaacaactatgatcaccatgaaaattaacggcatgatgtgcccccactgccaggcagcagtgacaaaggctttaaacgccatcgagggcgtgagcgctgacgtgaacctggaggataaggcagcttacattacaacccagggagacgtggacaaggaagctttgaaaaaagcggttgtggatgcaggctatgaagtggtaagtgtggaataagatccaacagaaaaaatatcagggagggaaatccgcagatggattcccttccttttttatgaggattccttcagctccatccatgcttcataatagtcatagcggatatcctcgcaggcggtgagaagaaaacgcccgcacagagctcctggttcacagcctcttctgcgggcctctttttcccacaggcagcggtcaaagcctatgacatcgtaggcatttaccttcagaaccccgtgtaaatacaaacgtggagaagagtcaccaggccttaaaggagaacgtttctctgtatcggaagacttgttctcgtctgaaacagaggaatacgaagaggagccttgctgtttgccggagacaggctgtgcacagttctggttcaggctgggggttgagccggccggaaggaaggcttcctcctgggaagcaaaaattccgtacacaggctctgtcacagggaaaagggaggagtaataggtccctgtgcggtattcatcgtggataaaggtatgaatgtcctggctgtcataaatggaaaattcatagatgccgggaagcttggtgcgcagggtgtgaaaaccctgggccagcaggttgtccaggcggcggatgagctgggctttccgctggatcttgtcaatggaatcctgaagctgggcaattttttccagaagacggtggtggttgttttccagggtctcctccagctgggggacggtcatatccggaatcttctttaactccttcatagacagagagaggctgcggtaggtgaggatctcagaaagctccatgatggtgtggaaggtgggacggcggtaattattgtccggcagccgttcaaaatggatcagaccttccttttcccagtagcgcagggcagaaggggccacctggaacagggaagccatttgattaatataattcattttcataatcacatatctccattggtgtttttatgatttttttgaaaaaaagctcttgactttaaagtaactttaaagtttatactgtacaagaattataacacaaaggattgaggaagtcatgagaaagaaatttttaaaggtagttctgccgtctatgctggcctttgttttttcaggggtgtatgccatcgtggacggatttttcgtgggaaggaatacgggagatgcaggacttgccgccatcaatatggcttatccccttcaggctattatcctgtctataggaacaggggtgggtatgggggctgctgtggagatcgcggcctgcagaggcaagggggatgaggacggggaacagacagccctggccaatacccttcggctgctggtgaccatagccgtcattgtcattccgctgctgctggccatccatgttccggccctgaagctgctgggggcccggggagagatcctgcccttagccaggacctacacggtgatcgtggtgggcctgtccatattccagctatttgccacaggccttaccccggtgcttcgggggtatgaggcggccgtggcctgtatgtttgccatgatcggagggtttgtcaccaacattattctggatgctgtttttgtggcagtgcttcagtggggtgtggcaggagccgcggcagccactgtggccggtcaggcggtgaccatggtgccctgtatggttttcctgtggggcagaatccgcaggatcacgaaaaaacagtggaaattcagccgggagcttttggtgcgcatgggaaagaccgcaatttctccctttggacttactatgagtcccaacctggtgctggtatttatgaaccgaagcgccctgctgtacggaggggagcaggcggtggccgcctacgcagtgatcgcttatattgtatatattattcagtatcttattcagggaatcagcgatggcagccagcctctcatgagcttttatctgggaagcggtgagaaggaaaaagcggtaaccattcgtaattatgcctatcagtctgccatggtagtggccgccatctgctttgtggccgtgtggtttaccaaggggttgatcccagtgatgtttggagtgtctgaccgtgcaggccaaatggtgggcacggcccttcccctatttgccgccagtggttttctcattgcatttttaagggtgacgacctcttatttttactccgtgcgctgccatatgcccgcctatattctggtgtacggtgagccccttgggctgatggtcatggtgggctttgttctgccgcctcttcttgggcttgtgggagtgtggctggcaacaccggtgacccagcttcttctttgtatggccgctctatttctgctggtgggacagaacccaaggaggcaggcaagtctgcagggaaataagagccatggtgaaagctgctcccaaagggattgaaatcccttaattcctatggtagtatagggcttaaggaggcgttggatatgatgatatcaacaaaaggcaggtacgccctgcgggtgatgatcgatcttgcacaaaattcccaggaaaattatgtttcacttaccgatattgcaaaccgccaggaaatctcagtaaaatatctggaggcagtgatggctattttgaatcgttctcagatggtggtgagccgcatgggaaaaaaaggaggctaccgccttgccagagaaccaaaggaataccgggtgggagacatcctcactgtcaccgaagggccgctggcccctgtaagctgcctggaatgtgaaaagaaccaatgcgccagggcggattcctgtgtgaccctgcctatgtggaaggaattggatggcttgatctccgactatctgcatcagatcaccttggaagatctcatccagggaaatgtgaaaagacgttagaaaaatggcttggtatacaaaatacggtgtggaacttctctaatttggaggtagtttcacaccggatttttattattgaagctgatgcttaacttttttaatgaacagggatgccaggatcagcacaaggccaatagccagaagccatagcttgggcctgaaattttctacggtcatggaaaacagataaaagttacctaatttatctcccagtccgaaattcatggtatagaagacaagtgggatcatataggcaatgaccgtattgttggtgacagcggcagtgagcatcccaagagagcctagaaaaatcccatcagagacagtgcctataaccagcgcaggggtgatctgacatctgcctgccgccatgaaggcagcagacaagagaatgagagctgttaaaagaaggatggagtacagggcacggatcatatagattttctggatgcttacatatttggaacataccacgtcatgaatttcctggttttgttccggctgaaacacaggagtgagaaggacgatgcctgtgagagccacgaacatttccagaggaacggcacaggctctggaatctaggttggaggttccgaaaataacaggtgtgagaagcagcaggactgcacttactgctaaggacaaaagcgtattatgcctgagattcagcgctgcgatctttaatagaggcagagagttttttgaattgacagcttccatacagcttcccctttcttttttgttcataaaggatcatggttcctgcaatgagcaggagggataccgttgcgaaaagcaggcggttggcagccaggtgccagaagttatccagaaagtcctgtgtccggaaaaaggacatggtgccggaattgtgtcttggagacaggcgcagcagggcatagccggcctgcgtggagccgattcccagattgatattcatatcccaaaaccaccacaagccctgaacagcaatggcaatgggagtattggtcagttctgtcaggaacatacccagggaggctgagatcatcacggaaggcaggagccagccaagatcatatttcagcggcgccagataatccagcacctggggactgtacagactccaggcagaggcgttggagatataggacaaaaggatgaccggtgccaaaacagacacaagaagggctgcgtaccgggtgaggatgatcctggccccggaaattttagtggtgtagatcaggtcagccattttcgcccgtttatccttcaggctcatgagaactcccaggaaaacagggaggatggacagaatcattgcacatgcatagtcgctgaacagccttgcatatcccccggtaaatctgtcctgatccctgaccagctcatagcgggagagggcctcttcataggtgagaggaacagtgccaaaggagatcagtgactggaccgcatatttggacccgcctcccagcatgtcatctgccttttccatctcctttttaaattcacggtaagaaagtccctcttttaaggcaatggacagctcctgtcccgctgaatcccggacagtctcttgcttagaagattggatcacaaagcttccattgccgtctgcctccaggctgatatcatcgccaccttctatggaaaaactttcttccccggagtccttctctcctttctgggattggtaaatggcatccacaccaactcccgtgagggcggacagaatctgggccattttcatctgctggttttcgttgagctttacgtttttgtaaaaaccaatagggtaggtggtataattgttgtgtacaaattcctggtacagagcgtccagggcggcaggcatgataatttccgggatttcttcattttttgtcccatagttttctccaggctggggctgggacagcttatcctggctgaaatccaggacaccctgagagtacagggcaagggtcatcaccagcacaaacagaacaaaggggactgagaatacaatttttttcagttcacggataaacaacatcactgatcacctccaagctcttccgctgacaaggtgaccggggctgccccattttcttttaggtacagcatataggcatcctcaatgttgggttcacagggctgggcctcccacacaggctcctcagacagaaaacgaacagatattttctgcccctggggatggagactggtgataacaagctgttttttcagggcaggaagctctgctctggacaccagcttggtaaatacctgcccctgtgccgcttccagcaatttttccactgtaccgttgtagaggactctgccattgtttaggatggctatattttcgcaggaggcttcgatatctccaacaatgtgggtggaaaggatcacaatccgttcttcggcaatttcagacagaaggttgcggaagcggattcgttcctcagggtcaaggcctgcggtgggctcgtccacaataaggaccttgggctcgttgagaagggcctgggcaatacccagccgccgcttcattcctccggaaagggcttttacttttttatccttgtgctggaacagatttaccctttttagaagataatggatgcgctcctttctctcccttgcgttcaggccacagagtatgcccagatagtccatgacctcccagacactcatggagggatacatggaaaactcctgaggcagatagccgatgatcttacggacttcctttgcgttttctatggggatgccgcagatggtgatctcaccgtcttttttctggagaagagtggcaagcgttttcatcaaggttgtttttccggcaccgtttcttccaagcaggccgaacataccttggctgatggaaagattaatgttatacagagcctgtttttttccgtaaaacttgttcaagtttttaatttcaatggactgattcattgttattgctcctttcgtgaaatgtgtttccattggatggttttatcataaggagcaattttcaactttttatctacaattggaaaaaatcttgtgatccaggagccggagattgggacggaaaaaattcttatagcatgaatactgcctctgcggtggtttggggcttgttggccagcctgagatatccgccgtgtttttcacacaggactttacagatataaagacccattccaaaatgttcaccgccggtctcaccggaggatttgtaaaaggggtttaaggcattggccagatccttggaggagaagccctctccatcatctgacacggtcagatagagcgctccctctttcacaaggacctggacccagagggtttccttggcaaagcggcaggcattggacaggagattttcataaacctgcatgatcacggcaaaatctgccaagaggctgtgatcctttagagagctgccggaaaatagaaactttttattttggcagatggaatctcccatggatcgaagctggtccgcagcatcctggccggagatactctggcgtttcacttcaatatcctccaggcgctgcaggtcagtcatggtatttacataagattccagccggatgatatgccgcttcatcatgccagccgtggcggtgatcttcttagggggcatcaaagaggcatagttcataagcatttcgctctggcccttcagaacggtcaagggggtcctcagatcgtgggcaaaggcggcgttcagccgtcggcgttcttccaccagccgccacatttcctggttgttctccagaagggcctcccgcattttttcaaaggactggcataattttcccagctcatcctgctttttataaacaatttgaaaatccaggttattttcagcaatatgctgggcggcctggtccaaaagctccagaggcggctgaagctgccttttgtagaacaaaatgctggacattcccatacacaggataaagcacaggggatacacagctaggcttaatccacccaggagatcataaatatgtttctcaatgggggtaaacaaagaggtggcatcctttgtatagtaccttaaaatgccagtatgatcagaggtggctgcattttcaggctgatctgaattttgggggaaaccaatctctacctggctgccggtttcttcatagtcaagctcgtatttgttgtagatcaggcgctgtccccactggcagagattggagaatgccagggacagtcccaggccggccacaatacatgccagcatatatacagtaaaggattttttgattgatctttttgtgaaaaagtcttttattttgtccatcgatatcccactccccagactgtctcaatgcagggcttcatctgtgctgcggcaaattttgaacggatccggcgcacatgctctgcgataacagaactgtctccttcactgtcataatcccacacaagctcatagatgcgctccttactgaatacctgccccgggtgctgggacaagagctccacaatgtcaaattcctttttagcaaggaatatttcttcgccgttgtagtacaggcttcgtttggtataatcaacggccagccggtcatccagatggattctgttcgattccctgggccgccgttcccgccttaggtgggcaaaaactcttgcccccagctcctctatggagaagggctttacaatatagtcatccccgcccatgcccaagcccttgatcttgtcactgtcttcaatcctggcagtcaaaaacaagatggggcaggtcacaaaatctctgatccgggagcagacctccaggccgtcaatgtccggcatattaatgtcaaggaggatcagatccggatgtttttctgcctttttcacagcctccaggccatttgaggctgtgcatacgtcataacccttcatctcaaaataatccttcagcatgatcacaatatcttcctcatcatccacaacaagtattttatctctcacagataacacctcctgaaacgatcatacaggcaacttttcaactttttatcaatttccggaagccatggaagcaaaattttccggcagcatccggataattttaaggataaaagtctgcggcttctcttgtcaagaggtttcttccaggcttataatagaattatgataatcgcaaatacattcagggaggttgatgataatgaatagtatttttgaaagagtcagtgttagggaattccaggaccgggatgtggaggaggaaaagctccacatgcttttaagggcagccatggcagcaccttctgcctgcaaccagcagccctgggaattctatgtagtgaaaaataaaaggatgattgaaaagctgtccgcctgcagcccctatgcaggctgcctgaaaaatgccccggtggccattgtatcctgttaccgtacccaggaattgacggctccggattatgcccagattgatttgagcatagccacagagcatattttgctggaagcagtggagcaggggcttggaacagtctggctgggcattgcccctttagaggagcgtatggaggatgtaaaaagaaccctaaatgtaagggaggatttgcagccctttgccattgtggcctgcggctatcctgtacatagcagagaacagcagaaccgctttgaccaaagccggatccatatacttgagtaaggatggaaatgagaggggcttaaagtgtctggttccaatgcgcttttcttctggattatgaaaaatcgtgccgcatttaaagcggcacggttttttcatttcatcaattcttcgctaaggtgcataatttccggggtgagcttttcccgttgcttttttgtgatgtgtctatagagggggtaggcggccaagatgcctgcgatccctaaaattcctatgaaaattccggcagtaaacagcttgtccccccacaccaggcagaaggacattcctgtcccaagaaccagagtgctgatccctcctgctgtgagagaggcgatggttccaggtctggtgacacttttatccagtcggcgcagacggtccatctgttcttcttgtctgggaagatatttatcccggatctgctttatttcctcctgctgttttgctgaataggaatagcaaaatgcttcttttttattattttccattgtgaatcctcctaatatttacaataaatgtgcttccctttcccacttcactttctacgaaaatatccccgcccacaatatccatcacccgtttcacaagggcaaggccaagtccattcccttgggttgcatgggaagtatcgccctgataaaatttctcaaaaatatgctttcctgtttccttggggataccgcagccagtatcggacacacccaccacagcagtttccccttcggtgtgcatggaaaggcttattcttccccctgggggcgtgaattttactgcgtttgagaacaagttgttccacaccagagacagaagctcccggtcactttttaccattacctgatcctctatatgggtgtcaatatcaagatttttttgctcccacaggtcttcaaaaccaagaagacattcgcataattgttcccccagatcaaaggtttcggtcatgggatggatctgctgattttccagcttattcagcttcaatatattggtgatcagattggccagcctgcgggaggcatttgtaactgacatagcgtattcctgtatttgttcttgggaaagccctggctgctggagcatggtgccgtaattttgtatgactgccaggggcgttttcagctcatgggaaacattggatataaaatccgtccgtagtgtctccataccggaaagttcctctatcattgtgttaatgcagtcaatgatctcatggaagccttctgcaacaaataggctgcgggcaggtttgaccctggcagtgaaatcccctttcactacttctttcactgctgctgcgatctcatttactggacgctccactgtgaaccgccgccggacctcatcgatgacagtaaacaggagacttaacaggacaacatttccaaaggttaaggcagcggcctcctggatcatttcctttgagagctgggtaagtcccattgcttttgtcatgctggtgagaaaaaggaccatacagcaggagatcacaaatgcaatgagcaagaaaaggatgcagtatctctggagggagcgtgccagcttttttcttacataggaattattggattcgatcattttatcaccgccttatagccaagaccatggaccgtgacaatctcaaaggcactgcagccagatagctttccccggagctttgtcatatacacatccactgtgcggggaccggtggatgtgtccgcctcccagaattcatccatgagctgggacctggtaaaggtctttttgggataggatagaagcttgtacagcaggctgaattctctggcggtcagaggaatttcttcatcctccaggtacgctgtgtgctcatctgcatccatggagaaatttcccacggtgagttttctgctggaggcgatctttgcacggcgcagcagggctccgatccgcagaagcagttcgtccagatcaatgggttttaccatataatcatcaattcccacccggaatccccgctgtttagaggcaaaatcatctctggcagtcataaacagaatgggtatattttcattgagggagcgcacggtctgtgcaaattcaaagccgtccgttccaggcatcataatatctgatacaattaagtcaaaaacctttccatacatggcatcgaatgcatcttctgcattcaggcagccgacagcctcatatccgctttgattcaaaaaagaacacacgcctcggttcagctccctgtcatcttccaccactaatatttgaaacatggttccgacctccttccacattttttattattgtatcatggatatgttaaagttttgtttctgtttttctgttattttaattttcctaaaatttggtccacgtcttccactcccttccaggttccgtactgggatcatcacctggaaggaaaatttcagcagctgaaaagggggtgtagctggattccgtcagttgttttttcagataaactattgtaaaataaaagtctgatacagattatggtgttacaaggagagtagggatgtcaaatataacaaagcgtgccattgaggcatcactgaaaaaattattgctggaaaaacccctggataaaataacaatctcagatattgcccaggactgcggcattaaccgcatgaccttttattatcattttaaggatatttatgatctgatcgagtgggcctgccaggaggatgcagccaaagccctgggaggaaagaaaacctacgacacctggcagcagggattccttcagattttccaggcagtccaggaaaacaagccttttattatgaatgtataccattcagtgagcagggaacaggtggagctgtatctgtacaaggtcaccttcggccttctcatgggagtagtggaagaggaggcaaagggcatggaggtgcgcagtgaggataaggaatttattgcgaacttctataagtttgcctttgtgggcctgatgctggactggatcaagaatggaatgaaggaagatcccggccggatcatagaccgtctgagcacccttattcacggggatatcagccgggccctgaacaactaccgcacagaccggccccatcaaactgcccggaatgattaaaattattacagcttttccccggtgataaatctttcatcaccggggtttttctgtttatggaagacttctctgttttgtattacattagatttaacaaaaacaaaacaataaaaaacagatggaggtaaaatatatgtattattcaagcggaaattatgaagcatttgcacgtccacagaaaccagaaggcgtagaacataaatcagcctatattgtaggttccggtctggctgcactgacggctgcctgctatcttgtccgtgacggacagatgaagggagagcatgtgcatatcctggaaaaggaagcacttcccggaggagcctgcgatggttatctctacgaaggcctgggatatgtgatgcggggcggaagagagatggataaccattttgaatgtatgtgggatctgttccgctccattccttccattgagacagagggtgtgagtgtactggatgaatattactggctgaacaaaaaggaccccaattattctcttatgagagccacggtgaatcggggagaggacgcacacacagatggaaaatttgccatttccgacaagggtgccatggagatcatgaagctgttttttactcctgacgaggatctgtatgacaagaagattaccgatgtgtttgaccaggaagtactggattccaacttctggctgtactggcgcaccatgtttgcctttgagaactggcacagtgctttggagatgaagctgtacatccgccgttatatccaccatattggcggcctgccggatttcaaggcccttcgttttaccaaatacaaccagtatgaatctatgattctgcccatgatcaaatacctggaatccttccatgtgcagttccactatcataccaaggtggtgaacgtggagtttgatatccaggaggacaaaaaactggcaaaacgcattgtggtggaaaaggaaggcaccgaagatttcatagacctgacagaggatgatctggtgtttatcaccaacggcggctgtgtggaaaattccagccttggctcccagaacacccctgctccttttaatactgaaattaagccgggaggcggctgggatatgtggcggaaaattgctgcccaggatcctgcctttggcaatccggataaattctgctatgacccggaacagagcaactggatgagcgccacagtgaccacactggatgataagattccgccttatgtgcagaacatctgcaaaagggatcccttctccggaaaagtggttacaggaggtattgtcactgtgaaggattccaactggctcttaagctggacctttaaccgtcagccacagttccgctctcagcctaaaggacagcttgtgggctggatctacggcctgttcagcgacaagcccggcaactacgtgaaaaagcccatgcgggagtgtaccggcaaggaaatctgtatggaatggctgtatcacctgggtgttccggaagatcagattgaatccatggcggaaaacagcgccaacacagttccctgcatgatgccttacatcaccgcattctttatgccaagagcagcaggtgaccgtcccaaggtagttcctgataaggctgtgaatttcgctttcctgggacagtttgccgaaactcagagagataccattttcaccacggaatattccatgcgtacaggaatggaggctgtatatacccttctgaatgtggacagaggcgtgccggaggtgtggggcagcgtgttcgatatccgggcactgctcaatgcaacggttcagcttcgggatggcaagggaattacagatatggatatgaatttaaaacaaaagcttgcccttagagatgttttgagaaaaattgaaggaacggatattgagaagctattaaaagaatatcatgtgatttaatcccctttggcatctaaaggataggcaggggatgaaaatccagccccattgaataaggcccccgcttgtgtcgttgccactgaaaagcgggggccttgtttgagaaaggcaaaagtctttggtaacccctaaacccaggtcaaggatcttgtattctttgtggcctggaacttggaagtctggtataatgaaggcagaaatacagccgccagtctcataaggaggagtgataatatgcaggaagagtttgatccaggcttttgggaaccggggaatctggagtctgcccggaaggttgtgaacattaagaaaagctttcaatgggagggagaagattggctgcttccggccgtctatctttttgaagaaggctttgttttggacctgtgcaacaagatttcagtaaaagagatggaagccttttttagaaaatggcccagggaaaaacgcgaaaggaaattatcaccaaaggagatggaggaaatggaggcccagtcaccggtgagcttccatttttttatagaggaaatagtcataaacgggcagaaagcttatgagagccgttcaacctgttttgtctggcatcccctggatatggagcaggacatgctgtcccctgagggagaagagatggttgacacatatggactgtccagggattgggcatggagattcaacaggttctttttctcgtggccagaggggatgaagaaggagatcacatccttgcagatctctttgaaggaacctgtgacaggctgtccctgccttcaagaatttaccactacagttggtatggaggaacaaaggatccaagtcacacatccagtgtctttggagaattgtgaactttggattaagagctgtgagggaaaggtgtgcagccctttttcggaggaaaaagacggagaatatccttcctgttatcaggtcatttcccatgaaatggtatctggtgcgtcctcaaaagaatattatgtccgtgacaccagcccaggagattcacccaggatacatggaggcgccgcatcagtgagtatcctgacagattcccccaaggaggcattttcctccttgtattttcagccgccccagaccatacggtggtatgtggattttttgataaaaggtaaaagaccgcttactcttaaggttttactttgatatgccggctcttttagaggggttgcttggcttctatatgaatgataatgatgtaaataaaattcagggtacttgaaggaattcaagtgccccttattttattacacaggaaagtgcacggaactttcctatgtaataaaaaacctccaagggatgcacacaatgtgctaaggaaagccgcttcgcagctgcatattggtgcacaaagctgccaagcccttcatgagtgaaggaatggggtattgaagcgggtttatccgctttggtcttaacaaaaatgaacacttgttaacttctgatttttataagcccgttccccttgtgggaaatgtggaaaatgaataagatagtgccaggaggtataggaactatgcagataaaaaaagatgaaattaaggaaaccatccgccttactgcccaaagagaatttctgcttcacggctatgaaggagcgtctcttcgggtgattgccagaaaagccaacaccactttgggaaacatttatcactattataagaacaaggaggagctgctgggagacatagtggaagagcccctttcatccctggaaaacatgatggaggagcatttgaaggagcaggtgcggctctattccattgaagatttggaaaaggctttggaggaatttagcgatatttttgaagaaagtgacctgcgctatctgatggatgaacggctgatcattttgatggatcttaaaacaaccaggtatgtagaacgcagagaccggtttctgaaaatcggaaaggagcatctggcctggcactggaatataaaggacagcgattccgtgtatattgatattgtgataaccatgtttgtgtcctgtgtgcgtcatgtgctcctggagcataaagatgaaaaaaatgccaagacagagtttctcaaggtgtttaaaatgttatgctccgggctgatcggagggagcagggagggcctatgaatattgtacagttaaataaggtaaacaaatgttatgaagtggcgggggagaagacatttgccctaaaagaagtgtccttttctatagaagaaggagagtttgtggtgatcctaggacccagcggagcgggaaaaagcaccctcctcaatattctgggcggtattgacagagccacctgcggagacgtggaggtggcaggagaaaatctcacggctatgagtgaaaaacagctttccagataccgggcaaaaaaggtggggtttgtgtttcaattttataatctgatccccactcttaccgcagaggagaatgtggcgttgatgaaggagctctgcagccagcccttctctccaaaagaaattctgggaaaggtggggctcacaggccatgagagaaagtttccagatcagctctccgggggagagcagcagagagtctccattgcaagggcggttgccaaaaatcctaccctgcttctctgcgatgagcccacaggggcgctggacagtgacaccggctgccaggttctgaaggagctggaattcctgtgcagaaaggaagggaaaacggtgctcattgtcacccataatgaaacgattgcccaagctgcagataaggtgatctatatcaagaacggaagagtgtcgaacatccaggaaaatcccagtcccctgaaaataagggaggtggagtggtagtgctgtttagaaaaatgctgcgggatatacgaaaaaataaggtacagtttctggcgatttttcttatgatgttcctgggatgctttctattttcaggaataacaggggagtggcagggctttcgaacccatgcacaggagttccgaagtggacaaaattttgcagacgggtggatattcggggaattttccgatgaggatgtggaaaaggtaagaaatcacaaaagtattcgaaaggcccaggaaaggctggttctgcaggctcatttaaagagccgggaacaggcggcgctggactgctatttcacctgggaagataccatttcctcccttcttgtgagaaaaggtatcccctatgatggccaggaggaaggcatttggctggatgatacctttgcccatgaaaacggataccaggtgggagattccctgacccttacatacagctcggctgagataaccggagaaatcctgggccttgtgtacagcccggaatacatttacggtgcatctcagggagaaatggtcccggaccataaaacaaaaggctttgcctacgtaagtcccagacttttgcccgcagggaagctgacaaaatataatcagatcgcagtaaaaacacaggaggaaaagcttacatttctaaaggagctttttcccgggcagagggtggtaatccaaaatgcaaaggaccacccgtcagtgtctatggtaaaggatgagtatgagcagcaccgcaccattggcaccgtattttcagcagcctttttattcattgcggtgatgatcaccattactaccatgcaccgcatgctgaaaaaacagagggtgcagattggaatcctgaaggctctgggatttggaaaaaagaagctgatccttcattatatctctcacagcacccttgtttgtctggcaggagcagggctgggatattttttgggataccgggttatgcctgggctgatctatgggtttttaaaggaaatgtatgtgcttcctgtgtgggaagggatgcttcctggagagtatctttttctgcccctgggctgtaccctgctttgcttgatcatcagctttggtatctgcagaacttatttaaagggtactgctgcggacagtatgctgcaagagcagtatcatctatccacctttcgtcctatggcaggaagagtccctccatggctgtcctttgccagcaggtggaaccttcgggatatcagcagaaataagctgcgcagttttatgaccctgtgcgggattttgggctgtacagccttactgttcagcgcctttgtgctctatgataccttcaccaacctgtcggtctggacctttgagaagcagcaggcctatgaatgtaagatcacggaactcccagatgaggagggctgccaggaactaaagaagcttacacagggagaactgcttatggaggacatggcctgggtaaaggccgctgacgggaaggtgcgtacagtaacccttacggtgccagagagcagccaatactaccggctggccaaaagcctgcatgaattcacacagatttccggaggcattgccctgtctcaaaaaacagccagggagcttggggttcaggaaggggattttcttacctggcacagggatggagaagcggaggtagtctcccagataaaggccattgtgcgtacccctttaagccaggggatcattgtaatgcggtctgattatgagaatactggccagtcctactttcccaccgctattataggccggcggccacaggagggatttggaatctatgaggagcagtgcagcatctcttttcaggaggatctgacgaaaagtgtggatgcggttatggacggcatgatcatgatgatcactcttttggtaagcggggcagtgatcttaggaggtgtgatgctatataacctgggaatcttgtcttacctggaacggtaccgggaatttgccaccctgaaggttcttggctttggggataaaaagatcaggaagattatggtacagcagaatgtgtggctgtccacagcagggatcggggcaggaattcccgggggctttgccctgattcattttatgctggctactttgccagactctatggacgtgccggtggatgtaaatgtactgtcctgggttatcaccgtgtgcggcaccatgctcctgtcttggctgatcagtaccgtggtctccagaaaaatcagcaggatccacatggtggaggcattaaaggcaaaggaataatgccagtacaaaatatcaggaacggatggcatgattttcctggaggacgccttgcattttcagagggccgtgctataataacagcagtaaaaaactgaaaaaaggaggttcttccatggaactggagcttttgagaaaagacatggttgcggccatgaaagcaaaggataaagcaagaaaggactccatctcctctctcatatctgcagtgaaaaagacagctattgacgagggatgcagagacgatattccttcccagctggtggaccgtgtgatattgaaggaaatgaagaccgtaaaggagcagatcgatacctgcccggattccagagcagatttaaaggcagagtatgaggcgcgctatgaggtttttgcagagtatgcgcctaagctgatgagtgctgaggaagtacggacctgcctggaaaaagagttcgcacaggtccttgccaccaaaaacaaagggcagatcatgaaggctgtgatggggtccttaaagggaaaagcagacggcaaggtcatcaatcaggtagtggcagaatactgtaaataaacagatactttggaacagaagggaagagaaaacccttctgtttttctatactaggaaagttcggagaattttcctatgcaatagaaaccctccgggggcatttctttagaagaattttataatttccgcagcctgtatctattgacagtccagagttcatattctaaaatgagtgtattaatacaattagtacacttagtgcataatagggaaatggaaaggagtatgccatgattattctggattatcaggaccggcggcccatctatgaacagattgtggaaaaattccagatgttgattttaagcggcggccttccgccggactccagacttccctcagtacgccaattggccatggagctgtccatcaaccccaataccatacagagagcctatatggaattggagcagcagggatacatataccctgtgaaaggcaaaggaagctttgtgtcacccaatatggatcttattgagaagaggaaagagaaatttatggaacaactggccgacctagtgcgtcagggaatcacagtgggtgtcactttggaggaatgcctggattggattcgcaaatggtatagggagggtagcaaatgattgaaataaaggacgtttgtaaacaattcggcgacatctgtgctgtaaatcaggtgacaatggacattgaagagcgtagtatctttggtctggtgggcagcaacggcgccggtaaaagtacacttttgcggatgatctgcggcattttacaacctggcagcggggagattctcattgacggggagaaactgtcagaaaaccagcaggccagagaaaagattttctatatttcagacgatgtgtattaccttcccaattccacacctatggatatgggcagatattatcagaaatattataagaattttgatcatgcacgttttttaaagcttttaaaacagtttggcctgaaggaaaagaagaagatcagtaccttttcaaaggggatgaagaagcagctttccatgatcctggggctgagtgcacagaccaaatatcttctctgtgacgagacctttgacggtcttgaccctgtcatgcgccaggcagtgaaaagtctcattgcctcagagattttaaggagagattttacccctgtgatctcctctcacaacttaagagagctggaggatatctgtgactatatcggtctgctccataaaggcggtattttgttgtcaagagacctggaggatatgaaattccatatacataaagtacagtgtgtgctgcgggacaaggaacaggaggagcggcttttgaaggaattggatgtgctgaaggtacgccgtcaggggtcccttcttatgatcacggccagaggcaccagaaaagagatcatggaacgggtagtctgcagggatccgctgttcagtgaggttctgcccctgtccctggaagagatttttatcagcgaaacggaggtggcaggatatgaaatcaaaaatcttctcttttaaacaaatgaaggagaattccagagaaaatctgtggatccctgttttatttgccattgctctttttatgagccatacagtctatatgctgatatcctttggcaagtgggataaattagactacaggcctgataaaattttagccctgtgcgaacatttgtggagagattatttaagcgcatccacccttttcatttctgttggaggagggatcctgtgcggtttggtgagcttcctttatcttcactcccagaaaaaagtagatttttaccatagccttccagtgaagcgcaggaatctgtttgtggaacggctggtacagaatgtgttgtattttgcagtgccctatgtggctgttctgtttttgagtgtgtgcgtctgcgccttgaaagggatgaccggcaccctatttatcggatatgcagtgagagagctggccggtcatttggtggtctttctgtgcgcctacggggtgacggctctggcagtgatcctcactgggcgtccgcttattggtgttttgggaacaggagccttttttctctatggactgcttttgggaaagcttgtacatggatatatgagcctgttttttgatacctataatataggatatccgtcatctttagtgaaactgctgctgaaatggtgcagtcctttggcagcaggaacagctgtgatggaggaaatagtgaaggggcattggctgccctttgtgatttattttctggtaacgggcctttttcttttgctggcactgtatgcctacgaaaaaaggcctggggaagcggcgggaagctccatggcctttgaaaagatcggaacagtcattaaatttttcatacaggttcctatgatcttaggtgtgggactgcttttccagaccatagacaatgtttacaatggggtgagcggatggtttgtgtttggaattttattcggcatatttttctgtcatggacttatggaaattctttatgccatgaacttccggaaatttattgcccacaaaaagcagtttgcacttatcacaggaattaccgcagtgatcgtatgcggcttttggtttgactgggttcattatgacagctatctgcccaaacaggccaatctttcgggaatccgcatggatctttcctgctttgacggccagcatctaacggatcctgcggttacggtgccagattgggagtaccagaagacctatgagaataataaaaactggatcacggctgacagctccggggttttatacgacaatctgaagcagatcgttgaaaaggaaagaacgaaaaaagatatggagactgaggcgctgaacaccgtaaatatcagctaccagttaaaatccggccgtactgccaaccgaatgtattacatcagccggaaggaagggagagctctggtggaggagctttatgcacagaaaactgtgaaggagcagaggtttgggggaattgagaaaaaccgggactatctggagagtgtgcgcctggaatatctgggaagcgagaaggagttttataacaatgagcaggaggagcggtttgcttttctggatgccctgtatgaggatatcaacaatgcagacagctctgtatatatggaatatcccgtggggacggtgagtctttattatgaaataccgtcaccggagggccttgtgtataacaagcagaaagaaccagagtccttcatgttctccaaccggatctacctgtttccgggctatgaaaaaaccataaaaattttagaaaaggccggcgtggatatgaagatccagaatatggatatttccaagattgttattacagattataaacaagatggaaaagagcagctcacttatgaggacaaggagaccattgagaagctgaagcccagcttggtggatatgaatacctggtgtcagtggctggacgttttagatggtgttttggcaaatgtcagctatgaaaaccgggaggagaatttcagagagatagacatgtattttaatcccaacaatctccaggtggatgtttctgcggcggtaagagagaaaggaaatcaagaatgaaaagtgtcagactggataaatttctggcagatgcaggtctgggtacccgcagtgaagtgaaaaaaattatacagaaagggcaggtagtcattgatggcgtaatggtaaaagacccggggtacaaagtggaggtttcccaggaggttgtctgccagggggagagagtaggtgcttcccaggaattagtctactatctttttcataagcctgccggctgcgtcagtgccacacaggataatcttcataagacggttctggattatcttcctgtgggaaagaaagagctttttcccgtgggaaggcttgacaaggatacggaaggtcttcttttgatcaccaatgacggggacctggcccaccggctcctttccccgaagaagcatgtggagaaaacatattttgccagagtggccgggaaggttgatcagcaggatgtccatgccatggaaaagggcgtggacattggagagaaggatcccacccttcccgcaaagctggaaatcctccgtacctgggaggaagagggagattggatgtccgaggtccatctgacgatctgtgaaggaaagtttcaccaggtgaagcggatgatggaggcggttggaaagaaagtggtgtatttaaaaagaatttccatgggtcctctgatcctgcctgaaaatctgcacaaaggggagtaccgtgagctgaccgaggaggagcgggagcttcttaagaccactgtaaaataatgaatgtccgcctctgggggacagtacacagaaaaaacaggcacacaaaacggaaaaaacaggcgtttttttggaaaaaccctcttgcggcggggtttttcttatgatataatgcagaggttgcaaaataaacacgcacagggattccaacagttggtgccgggctttgccgggttcttgcggaagacgatttgtgcggaggaaattaaccaaaaaggagaaaaaatcatgagcgttatttcaatgaaacagcttttagaagcaggtgttcatttcggacaccagaccagaagatggaaccctaaaatggcccgttacatctacactgagagaaacggtatctacatcatcgacctgcagcagtctgtaggcatggtagacgatgcttacaatgcagtggctgatatcgtggctgacggcggaaccattcttttcgtaggaaccaagaaacaggctcaggacgccatcaaaacagaggcagagcgctgcggaatgttctatgtaaatgaaagatggttaggtggtatgctcaccaacttcaagaccattcagagccgtattggcagactgaaagagatcgaagctatggaagctgacggaacctttgatgtactgcctaagaaagaagttatcgctttgagaaaagagatgtccaagcttcagaagaacctgggcggtatcaaagaaatgaagagaatcccggatgcaatctttatcgttgacccgaagaaggaaagaatctgcgttcaggaagcacatacattaggtatcccgttaattggtatttgtgatacaaactgtgatccggaagaactggattatgtaattccaggaaatgatgatgctatccgtgccgtaaaactgatcgtttccaaaatggctgacgctgttattgaagcaaaccagggcgcagcagatgtagacggagagcttgaagcacagtccgaagaatttgcagcagaagaagcagcagaataatcgattttccccacaatcgcaaatattgaatcaggaggaacaggaaatggctattacagcagcacaggtaaaagaattaagagaaatgaccggcgccggaatgatggattgtaagaaggctcttacagctacagaaggcgatatggataaagcagttgaatttctgcgtgaaaaaggccttgctacagctcagaaaaaagcaagccgtgtggcagcagagggtctttgcaaaactttagtggcagatgacgctaagagcgccgttgttgttgaagtaaatgcagaaacagacttcgtggcaaagaatgagaaattccaggcatatgtggcacaggttgcagaggctgttatggagacagaagcagctgacatcgaagctttcctggccggaccatggaaatttgacaccgagaaaactgtaaaagaagctcttgcagctcagatcgcagttatcggcgagaacatgaacatcagaagatttacaaaggtagccgaagagaacggcttcattgcttcctatattcatatgggcggaaagatcggcgttttagtagacgttgagactgacgttgtaaatgacggcgtaaaagaaatggctaagaacatcgcaatgcaggttgcagctctgaagcctctgtacaccacccgtgacgagatcagcgaagagtacattgcccatgagaaagaaattctgcttgctcagatcatgaacgacccgaaagagtcctccaagccggagaaagtgatccagggcatggtaagcggccgtatcaacaaagagctgaaagaaatctgcctgcttgaccaggtttatgtaaaagcagaagatggaaaacagactgttggaaaatacgtggaagaagttgcaaaagcaaacaacgccaagatcgttatcaaaggctttgtgcgttatgagactggcgaaggtatcgagaagaaagaagagaactttgctgaggaagttgcaaagcagatgggtggcaactaataaaaactgcttcatactgtttgataccggaaaccttgagctttcaaggaaaatcggatgtgtaaggtcaattgaaaactatcgtaacttagcgtaaaatatcataagaaatcgccgaaaattgggacttatttgagactaaattgggacttaaaatggtctcgattaattaaggggattttgcctgatgtttaaaggttagcgagagtcagtgactgggtacacgtaataagaatgttgatggcacactattgagaaatcagtggtgtgtcattttgcgttctggggaagagtatgggatgactggaaggaacattgccagatatatccgggtgaaccagttggagcagtctttaaagaagcagctggatgatggggagctttctctggtgtcggctgtggagctttcgcatctgtctccgaaggaacagaaaaccatatccaaaatggcggaacaggggaaaataaagctgaatgcgaacacggtcaagtgcataaaggctttggcgggcaatgtgacgaagaaaagtgtgctggagcatgtcgggtataagaaagaaaagaagagagatgcctgtaaagcgatacagctttcctcaaatgtgtatgagaggtattttgcagacgtgagggatgaggatgtggctagaattgtggaggaggcattggaggcgtggtttatagaaagcagggggagagaggttgtttaatgaacgtgacataggaatgctggataaatcgtattttaatattgtcctggcggcagactatgatgtgaccgtccagtctaagaatactggacatttctggtatatccataatccggagcatccggggaagggagcctgtgtaatcttccataagcacagggcttcccacccatatcatttacatgggagagccagaaatctgcatcaggcagtcagaaatattaagaagcataatgtgtttcagatgaatgggagaaagtagtttgtaagttgtgtttatgggtgtgaaatcattataaaaataaagaatattaaaaatctagccaattggaattagaattctggttggctttttcaatagtaaatttcctgcgtgtatgttaatattagagtataatttgggagaaaggaaacaagtgctttgattcagatagatttagtaaactatgataatttgacgagtcttggaatgaaggtaactcaatatgttaacagtaatctaaaagatataatacgggtgttgcttgacattttggaagacgattcagaatttgaattggatagctttttccctagagactaccttcagagaaaaccacaagaatgtagaaacgctatttatgaattatatgagttgatttgttcaagaaatattcgagattatataaaacctaaatatgaatatttactttatgctatcttggaatggtgggaagactgtgcagataacgaagaagacctgattgttaatcaaatagacgataaccttaaaaagatgttggatactgaggatggaagggggattttaacataaatacaggactatgaggaatattattatttttgttttcaagaccatgactttttaccgtcacaattgaacaatttagttatgctatatttgcagaatccccaattggtggaaatgttttttcagtacgatgatttggatgaatacattgacctgatggagtgtgatttgagagaacgttatttagaggctcgtaacaagaaaaagaatatatctaataattttttggctgataatatcgtggcggaattactctctacaatacggcgttttcaaaagagaataccacattttgaaaatagggatgaagtgcaaattactgcggatttacaagatgctgtagcaggagatttaaacagcaagtataggctgaacatttcgcgagagtttacgatgggtagggcacttaaaaaattaggagaaactgatttatacatatataaagaacaggaaggaattctcaaagattatgccgttcttgaaaacaaatatattgaaaattttacagaccaatataatcagttgatgggatatttaaatcctagttttgaatttggaattacactttcattaaatcgaacactttctttgaaacaagggtttgaaaaaatagaaaatgaattgaaatcacttagtggagagtttaaacctgtaagtatagaaagaattggtgaaaaggatacactgatgattataagcaagcataaagtgcctgaaacaggaaatgtgatgaaagtatatcatttgatttttcgattgaatgataaagagcgtaaggaagtggcagcacttgcaaggaaaaagaagaacaaatgatagcagaagtgaaagatgaatagaccaccgaattattatttaggtgggatacggcagattattgatatgaagtataaaagtgaactatcaccgtatgtggaaaccggcatgcttttcgtgcggaaaccttgattttatgcgggtttacggaattgtttggtggaaatgaagttgtgtttttgaatcgaatagatatggataagttaccgtggaaatggggatggggtaacgctatgtgagtttaatatgctgttggaaatgggttttgtcgagaaatttgtacacattggcaaaacccatactttttagtaaaaggggtactctggggcaaaataaagatttgtttataatgtagttgaaaaattataaaggtgctgttatatcattaattacgtgatatactaagaatacaaaagtgtgattgagtatcttcaaaggaaaagaaaaaatttaagtgcggataaggtagggagaaaatcattgatagaatacataataagccaacggaaaagattatatacggaaaaagaaaaaattttttataatggaaaagaacttgaatttgaagggaatataacggagatagtaagccaaaagaaagtagaactatatagggactttttgtccagacattttgataataccattgtgcttactggtgctggatcttcatatggaataggaaaaacagaaattaagggtatgaccatgaaaaaactttgggaaaagatagtggaagcgtgtggcgaagagactattgaaaaactaggaaaaaaaatcaattatataattgataatatttcaactgtaaatttagaagagtttttatcacatgcaagtttgtttttattgttgtacaagaacacagatagtgaagttgagatggtcgtaaatcagattaaaaaaataattattaaaaattgcacaattgttatgcctgaagattcaccacataaagaattcttaaaaagaatcacggcaagaaaattaaaacatagtagattaaaactttttacaacaaattacgatatgttatttgaacaagcagcgaacgaatgtggatttacgatgatagacggttttacttttacttttccgagagtttttaacggtaataattatgactatgacattgtcataagaaagaacagtagaattactgcgcaagagaattatgccaataaggtatttcatttgtataaattgcatggatcattagactggaaaagggatttggaaacagaccaaataagaaaatgtgatttttatagtaatgatgaacctgttatgatttttccaagtagcataaaatacgaaacttcatatgaacagcctttttttgaaatgatgtcacggtttcaaacggaattgagaacggataatgcattgttaataattataggctatagttttggcgataagcatataaattcaatgatatttgaagctttggaattgaatcatagtttacaattggtaattgtagatccgtttattgaaaattttgatgatattattaaacgaacagaaagatcggctaacataatgcttatacgaagtgattttaaggaattggctttaaactacccatattcatatgcatatagccaagatgaaacggaggaagaatgatgcagccatttaattatcattattttataggttatgtgtcgcaagtaactccgcagtatgtaaaaatacattttccatcgtctacactattgagtaaattcattttttctggcgaagaatttaatggaggtttggtaggtacatatatatcaattgaaggggagaactatggatttgttggtcaattacaagaagtagaagttccagaaaaagaaagattatcactttctgaaactgcatttaagaatcaggaatttcacccaacagctaaagcagaaattttattatcttttaatttgtttgatatgggaaaagtaacaaaaggagcaaatgtttacccaacgataggagcaaaagtttttgtttgtacaaaagagtttgtacaaaagtatgtccaaggatttggacaaaaaaggaaggaagaactgctaataaatattggatatttaaattctgataatcagacagaagtgacagtgtctcagcagtctttttttggaaggcattgtgctgttgtcggaacaacaggtggtggaaaaagctggtcattatctaaactgatagaagaagttaggaaaaataatacgaaatgtattttgcttgatccaactggtgaatatgcaaattataaaggcgaacattgtatacttgcagataattcgtactttagttataaaaagttagctgtatctgatttattctttttacttaaaccttcagaaagagcacaggctcctaaattgttagaggcaattaagacattaaagacacttgagattgctcgaaagcagggagggcttgattgttatttccaaaagggtgaagaaaaaaattatttgttaaaagctgggaaaaataaggtcgaattcattaaaatgcagcgtaagtattatgaaaaaattgattctaatgaattagattttgatattaagtatttggcaagacaaatacaaggtgagtgtgtttgggaagttgatagtagagattcgaattcgtggggaggaagatcagaaacagattcggcaaattgtatttctttagtcacaagaactaatgcttttgttaatgataaaaattataaaaatattcttggtattggtgatgtgaaagaaaagacagaattatcagaagctattagagagtttttaaatcccgaaaatagcgaaacattattaaggattggatttgagaaagtcggttatgattttaacgttagggagattattgctaattctttggcaaagtttttgcttaatttagcaagagaaaagatattcaaagaacagccaacaattttctttttagatgaagctcatcaattcttaaataagaaagtaacagatgatagttttacggcgtattcccttaatgcttttgatcaaattgctaaagaatgtagaaagtatggtctgtttttatgtattgcaacacagatgccaagagatattcctgttggaaccttgagtcagatgggtacgtttttggtacatagacttataaattataatgataaagaagcgattaaacaatcatgtgctacggctaatagtagtacattgacttatttacccatattaggagaaggggaagcaatattgacaggtgttgattttcctatgccattactattaaaggtcagcgtaccgacaaataaacctgattctgcaacaccacaatttaaattgtaatgatattatagaaggaggggataggaatgcaactaggtaaacttgaaaaaatagatgattttagaaagatatggccccatgaggcactggattttacgccatggcttgcagaggatgagaatctttcttttttatgtgatgctgtagggattgacatgaccatagatgagacggcgtcctctgtgggtagtttcaatgtggatatcctggctacagagacagatacggggaggaagattgtgatagagaaccaaccggaggatacaaaacacgatcatcttggaaagacgattacatatgcggcaggaaaaaatgcaaatattattatttagattgtcaggaaagccagggaagaacacagacttgtagtagagtggctgaatagccatacggatgatgatattggattctttctgttgggaatagaattgtggtctattaatcagtcagctccggcggtgaaatttaatgtggtggagaaatcaaatgactgggcgaaagaaatagaaaagtggacagcaccatgaatgcaacaatgaaagtgaagttggattattggacagcttttaatgagtatgtctttgaagacaaggcgtatgcgaaagtttttaagcgaagaaaaccttctacagaccactagtatactgtaagtctgggttcttccgaatatcatatgtcagttctgatgaatatacagaaaaatatcttggcagtggaatttgcgattgctgacaataaggaattgttccggcaactttatgagaagaaacaggaaatagaaacggcagcaggaacaacactggattggagggaactgccagacaggaaaatgagccgggttttgtatgagacagatgtggatttttcagacagggataagtgggtagagcagtttgagtggattaataaatattcagtaagaattgcaggggcttttagacaatttatgtagattttataacgtcttaggaacagtttaaaaatctaatatggtaggaatgtaactggaaaatatagaatgaaggtcttggcagatgttagatgttatgacttttgttttaacgggcatcaaactggcaatactgtatatacgttctgacaggcaaaaagaaacggcaaagcatctgccgtttctttttacaaatcatgtttaaggatgcgtttttgtgcaatctcatagacttcgtcatcttcccgtgcgccgattacaacaatcagcatatcgtcatcacggcggatgagctggtagacgatacgcagccccgcaccgcggagcttgacttttaaaaagccggaaagattagtggtgtttttgtttcccaggagttttccatagccgccttcgttttctggtaatggattctggcagactttctgaatcgctttccgaatcaggattttctggctgccatccagtttgcggaggtcttcaagggcttccggaaggtatttgacatcccagctcattcaaattcaatgccgtccgtttcttcatagtctgcggggctgaatccaaattctcggtccacctgttcctgggagataacggtggagggattaaaagcagacatgcgttgtgtggcagtggctaagagctttgcatcacttacttcatccagaaggtggatatattctttcggggaaagaaggacacactccggagagttgttcttcatgacaaccttggcaccatggcgttttacttcttcaaagattttcccggctaatccacggttgaactgggaaatggggattgtgttttcaatcgcacttctaatactcataatcatcacctctttattatagtatatggaatatcagttaaaaagtcaatagatttactgatgtatatgttgcttaaatatattttgtgcaattttacatattttacaccactttacaactttttcacaaaaaaatgccgtacagagcactttggtgtataataagtttgccaacaaaatatacgaaggaaagtgaccctgtacgacaaacttattatacaacgaaaagaacctgattggtagacttcatcaatatttttttatttattttgaaactttttctgcaccgaccgccgagactctgttcctgctggttttatccatcctggctatggaatccgctcattccatccggttcctttaccggcattttttatcaggcataacacaaaaatcccttaacgctttttactacgcctgttcctatgctaaagtggattattcccgcttcatgaatgtgaccgcatccatggctttaaagctggtccctgactccttgaagctgcagcccgtgttcctatgtattgacgacaccatggtctccaagttcggtaaaaaattcgaggatgtgtcgaagctttttgaccatgcagctcataacggctctaattacctgaatgggcactgctttgtcagccttatgctctgcatccctgtatggaagaacagcaggatcgtctaccttgctgtcccccttggctaccgtatgtggcagaaaaatgagaccaagctggagcttgctgcgtctatggtgcgtcagactatgcccaccttttcagggaagaggaatgtcatcctcctgtgtgacagctggtatgccaagaaaaatctcacatgcgttgtggatgaatatccggatctggacctcatctgtaatgcacggtatgactctgtcatttacgacctggcgccgcagcggaccggcaaaaggggccgtcctgccaagcatgggaaacgtctttcactgaaagaggatttctgtctgtccgacgaaaagattggggattattacacaggtgtacgccgtgtcctcacaaatatttttagtggaagggaagtccttgcctatgtcacatccacagagaaagagggcggttccagacgcctatttttcagtaccatttttccggagcagatgcagattttctgtgcatggcaggagaaggcacctttaaaccagacagggggcggctggatgaaatacatccccttgttctgttatggtttccgctggaacatagaaattagctactatgagcagaaaacattctggtcattatgcagctatatggtgcggagtcataaagggatcgaaatgctggtcaacctgatcaacatcacttacagcgccatgaagatactgccttatcaggatgaggcattttcaaaataccgtgaagaaagcgtgcaggaattccgtttttttctaagtgaacagatccggcagcaggtattttttgctactttcgtgcaaaataccgtaaccagcataaaatccaaaggtattataaaggctttgaaacagctggttcaggaacaatgctggcatttgtaaaacttgtaaagtggtgatattttataaaaaacaaaaaaataaatcagccttttacatagcatccggaaaactatacggatgcgtatttcaaatgtttttggagccgataatggctccttttttcattgcggaaaggcaggtgtggagcgtggcatctaggatacaggggatgttgaaatcggcggggatactacgaagctgtccactgccttatcgaaggtgaataaggaaatccgggatacgcaggggcagcttaaggatgtgaataagctgttgaaactggaccccggcaatgcggagctgaaggcgcagaagcagaggcttttggcacaggcggtcagtgagacgaaggagaagctggaggcttcgcggatgcaaacggcttcggtggattccatccggcagatggtttcgagcatccgggagatgtttgcggggatgcaggacagggacggcataggaaatatctgtattccggtgtatgtgggcggcacccttctagatgaggtggtggtgaatgcccaggcaaggcagaacctgcggtcaggagggaggtaggcatggcgtttatacagtatctggtgtttgacgggacggcgctgcccctgccggattcttatgaagttggagatgaggaagacggagatgtatatggaggggtataaggcggggctggtgaaggatacgtcttataagggactgtggaaggtggcgcttacgctgtgggagttttgagaagcggttgccggagggggcgtggtatacttgaaaaaaagaaagttgaagttgaccagtgaaaggaatttttaatatggcgttaatattttttgggaggtttttaaggcgtgagagattgtttcaaaggtattcaagtaaatcgtgattgagttaaaaaatttacattagggaggaataccatatgaaactgcagcttttaggccaggctgtaatacaaggagcaggcttattttatgcatctttaaagtataaaaagaaagatattgatagtgttgatcgttatatcccggaggttgattacacactgccttttgatggagagtggtacacagctaatggaggtgttacaaaaaatacatcccattcatgggagattctgccctagcgttttgcttatgattttataatcgtagatgaggaaggtaagagttataatagagataaagaagatttgcgtagctactattgctatggaaaagaaatccttgctccggcagacggtgcggttgttttaatcaaaaaccattttcctgactgccgcattatggaagatggacagcctgacccggatacgcctgatattggagggaaccggatcattatcagacattctccaaatgaatatagtgctgtctgtcatcttatgccagagagcgttaccgttcatataggacagatggtaaaaagaggggatgtaattgcgaggtgcggcaattctggtaatacaacggaacctcacgttcattttcaggtacaaaatactgcccatttttatacttgccttggcgtaccggtcttttttccaggcatacaaaaaaagctgtatgcaaaatattccatggttgatacacgtccgctgccagaaaaagaagagattaaagatggttatatccatcgggggttattagtaaggaacagcgggaataaatgagtatttattttaccaaatagtttaaagttgatgggtagatatactttaatccttcaattttcaacagaatagaattatttaaaggcatcagttatggcgggtgatgcaaaggtgaacaactcaaaattcaaaacgcaatttcatcaaaaatctgttatggttccatgggacgaagttgaaaatcggattggacataaaccgggcggtgtttgtccgttttctgtcaatgagggagttcctgtttatcttgacatttctatgaaacggtttacacaagtttataccgctgcaggtattgatacggtaaccatacgcgtataggatgtttgaaatccagataaaccacctgctatgcggtgctctgatcataatatttttgaggatatgcttataatttggatactacgtttttaaccagctgctcggtaaaatccgtaacttcggaaatagactccctcatccccccggcaatccattgattcaggatcccgttgcagccctgcgcaataaatcggaacagccattcattctgggtttggctgagcttatcgttttctatctgcatcaatgtgcgctccatttcatagcacatttctatcactttttgcggaaaagacgaatcgccatttgcggagaagatggcttcatatttttcctgttcagccttaaagctgaccataatgagcgtcagcacatcttttgccgtttcatttttctgtgataagaggatttccctcagttcttcgaggaactgttcttcaattttatccagcaggtcataaacatccagatagtacttatagaaggtagcccggttgatttctgccatgtcacagatttccttgactgtgattttattaagaggcttttcacgtattattttcgtaaagctctgcacaatcaccatttttgtgtatcgtacccgtgcatcaagtgccatatattttcctcctgccataccaatttggtaaaatccgtaatttctccaacacattttcagaaagtgtttatcttatctcacatagtgaaaatacgatgattgatttaacggcatggctttattatactatgaacaagacagaaaaacaacagctgtttattttctatcgacaagaaattttgtaaattattgaaaagaggaggtcatgacaatgacgaaaattattttggtaccggcaatcattgcgtgtgcagtcggcggcactgcgggagttctggagttatataaaaaatttgttccgggagcaacagacgaatatggcgatttcaaggagagcaagattgcaaggaagctccacgaggaggagaacaggaaaagccacaagtatgaaaactgattggagatgattttatgaaggtgctgctcatcattttactggcagcggcgggatctgcgggaatgattgtactttgcggggcatcgagatggagctttatttacctcataaggtatcgtatcctgaaatttgaatctgaaaagagcaaatacgctgtttctgcaaagcatgatgtctgcgctgtattgatcgcggtcattacacttgcggtcgttgcgctgattctggtatacggtattcctgttctcagggaacatctgagctttgttgacggcgttccccacatagaatgaggtgatgtctttgaataatgatagtgataaagcgaaggactcgcccggcatagaagttttggaaacatctgcacggatttttaagaagcacggaaagagcgaaaaggaaatacaggaatttttggaagagaatttccctatttcatccgctattgttcaaagggttattgaagcaataaaaaaatagaatatgagatttgggttatttatctgaagaagcatattaaaacatttggcagagcattgattgacagatatatcttgatattgttttaagttgcaaaatcatcatagagccagacgcagagccgatgagcttgtggggtaattcgcagtttgtcggttctgttctttactgaataaaattgccatccacagggcatactaaaaaattttatccaaaatcttgacagtcatatctcctctatagtatcctaaaaaactcatgaggggtttggaagattgaaaggccctggatattggcaaacaagtttccgaactttcaccgttacacccaaaatggctgtactattaccttgcgcatggctgcagtggaatcatcaaccagtggcccgaaagtaatatggaggaatctgttgatagcgtggcggattttgcagaaacgtttgttcaaaatacattaaggaaattgcaagacagccgattgcctgtctgcaatgaaagggaaggaatataatgaaaaatccagatttaaaaaaagcgctgggggctgctttcccaagaacgattcctattatggcagggtatttagtgattggttttggatatggattgctgctgcaaagtaaaggatataatttcttgtgggcgattttgatgtgtttgactatctgtggcggcagtatgcagtttgttgcggtggatctgctctcaagcggagccgggctgctaacagcgggcattatgacattgatgatacatgcgcggcacctgttttatggtttatctatgcttgtaaagtaccgggataccggaaaaataaaaccttatttaatttttgctttgactgatgagacatatagccttgtctgtacaggagatgttccggaaggtgtaaacaaaaacgcattttatttgtggattacacttttagatcagagttattggatagcagggagtgcgattggcggaatcttcgggcaggttgttaccataaataccacaggtgtagattatgccatgacagcactgtttgtggttattctggtcgataatctgttaaaacaggaaagccgtgttcctgcattggtgggggtaactgtttcacttttctgcctgttactatttggggcccgtgactttttgatcccatccatgataggaattactgttgtactgatgattttaagtcctatgctgaacaaaaaggagggagaagcatgactgacgttttccacagtttattattggtctttgtcatctcgttcgttactgttgttctccggttcctgccttttgttatttttcgggatgctgataaaaccccgaaagctctcgattatcttggcagcgtgttaccaggggccataatgggaatgcttgtaatctactgctttaaatcaacggtaattctgacgtggccgtttgccctgcccgaactaattgcaacgattgttgtggtcggcctgtatttatggaaaaaaaacactttggtttccattggaattggaacagtcttatatatggtgttggttcaggccgtttttgcatagggctgtatgaacgctgtttgcacagcgaaataggaaagagaatctgtataattgggaagatatttcggtatcttccctttatttttgtgtatgtccggcaaggcctgatcgcatataaaagaaatggggctgcgaaaatagcaaacgatggcttttttcacagctccattccagactttctgctttcagggttaattcgctttgcgctcctgcacctcccgcaatttacgctcagtataaaattccctgaagttaccgtccttatcagtaataccaggtacttttttgatgcgattttgttaaaaaaccgctatttttatcaaaaatcagctaaaatggaagaaaaagattgtattgttataaaaaaagcaggaaagtgataacgaaaaatacggaaacagggttatggtagagtcaccaaatgaaaacaaggaggaatgaaatttgaaacaaagaagcagagagaaaccaaaaaaagtatggcaggcaaattagggttcctcctataagaagctgcagagcaggcagggcttgtcatcggacaaagttgggatgacttcgcaagagatgcgtttacagggaggacagtacaaaaaaagaaaggtgggctataaaaaatggcaaaggaaaagaaatacaatccaggaagaatcggaattgggaagttttgggcatggcagagcaggggcgtgtcgctggcagtaaatattctaatcgttggttatttgtccatgtactgtacagatgctttacatatcaatccagggcttgtgggaacactgctgttagccagcaagatttttgatgggtttacagatttgtttgccggatatctgattgatactacaaatagcagatggggaaaggcaaggccatatgagctggcgattcttggcgtatggcttgcaacatggctgttattctcgtgtccggccgaggcaagtaccgtcgtgaaatgtatttggatatttacactttatgcactggtcaattctgtatttgctacgctgctgaacgcaaacggtacgccatatatggtgcgggcttttaaaacacaggaacagtttgcaaagttgaacagctttggcggaattgtaataatggcagtaagtatgatcgtggcaatgatcctcccaattgcagtgacggcagttgctacctcatcagcaggctggggtaagctggtggcaatgtttgcggttccaatgtcctttattggcatcctgcgatttctgttcgtaaaggaaacagaagaagtggaatcaaaggtcaatgacaaaattaatatgaaggaactgatcagcgtattaaaatacaataaatatatttatccagttgttgctatgatgcttctgttccagttcattcttggtttcaatgttgcaaattattattttaaatatgtcgtgggagatctttctatttatggggttatgggtattctttcggcaattgtgcttccggttatgttcttcttcccagtcctgatgagaaagtattctgttgcacagattactgcaggaggagctgttcttggtacgattggcggtgtgattgcatttctggcaaataaaagtattccgctgttgatgctgggtggttttatgacatctatcgcaacaatggctccatcctatcttgtagccttaatgctcctggattgtgggaaatataatcatctgaacggacttccccgtatggatggaacaatttctgcggtaaataatttctgcagtaaattaggaaacggaatcggtacaggtattatgggtattacccttggctttgtgggatataatggagaactggtagttcagagtgattcagtggttatggcactccgtattatgtacggtatgattccggcagtcggatacttattgattgtatttatgatgcgctcttacaaacttgataagatcaatcgcgaactggaaatgaaacagggagaataaggtatgagtaaagaaatattaaataagatgactttagaagaaaaagccggaatgtgctccgggcttgatttctggcgctttaaaggagtagaacgtcttggtattccgccccttatggtatgcgacggtccacacgggctcagaaaacaggatgataatgcctcagctgatatgctggggcagaatgacagcatcatggcgatttgttttccgacagcatcggcgctggcggcgtcttttgaccgggagctgctgaaatcggtgggcgagacgttgggaaaggaatgccaggctgtgaatattgcgatgctgctgggcccgggaaataatattaagaggtctccgctgtgcggaagaaattttgaatatttttcagaagatccgtatctggcttctgaactggcggctgcaaatatccagggggtacaaagtcagggaatcggcgtaagcatgaagcatttttgtgcgaataatcaggagaccagacggatgacctccagttccaatgtggacgagcggaccttgcatgaaatttacctggcggcctttgaaggagcggtaaaaaaggcagcccccaaaagcctgatgtgttcctataaccggatcaatggtgtttttgctgcggaaaataaggaacttttgactgatatcctgagagaacagtggggatttgaaggaatggtcattacagactggggagctgtaaaagaccgggtaaagggaatccaggccggattgcatattgctatgccgggtgatgacggggctatggctgtaaaaattgtcgatgcggtaaaaaatggttctctaaaggaagaagaactggatgccgttgtcgaaaaaattcttgagtttattgactggtcagtggcacataaacagcaggatgttatttttgattatgaggctgaccacaaaaagacatcggaaacagaaaaggaatgtgcggttcttttaaaaaatgagagcgggatccttcctttaaaggagggcactaagatcttgttcattggggaatttgccgcaaatccccggtatcagggaagcggcagctcccatatcaagtcctggaaggtagacagcgcagtagaagccgcaaagggctggagcaatatcacatatgtgaagggctattccataaaaggaggggaagaagacggtgcactttgcatggaggcagtcaatgctgcaaaggaagctgaggttgctgtgatatttgccgggcttccggataattttgagtctgaggggtttgaccgaaagcatctaaggatgccggacaatcagatctgtctgattcaggaggtggcaaaggttcagaagaatgttgttgtggtgcttcacaatggcgcgccggtggaaatgccgtggattggtgatgtgaaggcagtactggaaatgtatcttggcggcgagggcgttgggaatgcggagctggatctgctgtttggcaaggcaaatccctccggtaagctggcagagacattcccgctgaagctcagtgataatccctcctatctggactatgcgagaagcagcaattcggtggaataccgcgaaggtatttttgtgggatatcggtactatgataaaaaagaaatggaggttcttttcccgttcgggcatggccttagttatacgcagtttacctatagtgatctctgtgtttccgcagataatatgacggaccaggatcggattaccgtgagctgtaaagtgaaaaatacaggaagcagggcaggaaaggaagtaattcagctttatgtgggtccggccggggtaaacgggaaaattccaatggcaataaaggcgctgaaaggatttgaaaaaattccgctcctcccgggagaagaaaagacagtctgctttactttagataaaatggcgtttgcttattacaatacagaactgaaagactggcatgtggaaactggtgaatatcgtatctgtatcggggcatcttcaagggatatccggcttgaaacaacggtttctgtaaaaagtacggttgagattccctatatttttgatcggtattctgtcatggaagatatcatggctactgcaaaagggcagatgattatgggacagatgctgaacgccggaagaaaagaagaactgcaggaagaccagatggataccggacttggggacggcggacaggaaatggtgcaggcaatgctgaaggaaatgccgttaggggcgctggtaacactgggaactatgagtgatgagcagttggatcagatgattgccctgttaaatgcatgagtaaaaagaggtaaaggatggataaggaaaagaaataccaggtaaataaaaaagaaggatattggcaggttgtaaatgacaatggcgccgtactgggagtttccagcctggatatggtgattgagcaggacggctatgcatttaaagattttaaccacaatgggaccctggagccttttgaggactggaggcttccggcagaggagcgtattgttgatttgacagggcgcatggagattgatgagattgccggtctgatgctgtatagtatccagcagactgttgcgcggtttgatccctttgcacaatttgggtatggaagctctccatccgaagcttcgaaaatgccgtgggatatcagcgatagcctgaaagaattgattgaagaacagaagatgcgccatatcacactgtcaatggcggaaagtgcaggggctgcggttcgatggaataataatctgcagacattggcggaacagcagcctctggggcttccggtaaatgtagctacggatccccgcaatgcaccgagtataaagctggcagaatttactatgggcgcttcggattatttatccacctggccggacaatctgggaatggcggcaagcttttcaccggagcttgcaaaaaaatatggtgaggcagcatccagggaataccgtgctatgggaatatcgacgacgctggcaccccaggtcgatctggcatcggagcccaggtggaatcgtttctttgggacgtttggagaatccagcggtttgtcggcggatatggcaagagcttactgtgacgggttccagaccagtgaaggagaagcagaaattgcagaaggatggggataccatagtgtaaatacgatggtaaagcactggccaggcggaggtccgggtgagggcggcagggatgctcattttgcttacggaaaatatgcagtatatccgggggataattttgaagagcatttaaggccttttacggaaggggctttccggctggatggaccgaccggaatcgcttctgccgtaatgccgtattattcaatttcctacgggcaggacaaaaagaatggggaaaatgtggggaacgcctacagccggtatctcattacggatctgctgcgcgaaacctatggttttgacggcgtcgtctgcacagattggggtgtgattggggatccaggtgaaacaatcgacacggcaatgtgtggaaaaagctggggaacagaaaatctgtccgtgccagagcgccattataagctgattatggcaggggtggatcagattggcgggagcaatgatgctgcgccactcttggaagcctaccagatgggagtaagggagcatggagaagaatttatgcagaaacgtttccggaaatcagcggaaaggattctgcggaatattttccgcacagggctaatggaaaatccatacgtggatattgaggaagcgtccgcggtaatcagatgcgaggaatacaaaaaggaaggccatcttgctcagcagaagagtgttgtattagtaaaaaataagaattccatactgcctctttcaaaaaagaaaaaagtttacattccggaaaaggtgaagccggaaagtgtggactggtttggacaggtggtaccggaaagccgtttcccggccattgcacctgagatagtcaggaattattttgaactcacagacaagccagaggaggcggatgcagcttttgtgtttatggattcaccggtcagcccggcgtataagaaagggtttgttcccatcagcctgcagtacaggccgtatacttccacaaaatcaagagaaaaaagcgtggcagaagatagaagtattctggggacctccgcctgcacagataatgaatgtgatctggatgtgttgctggatacctgcgagaagatgagagggaaacctgtgattgtgtttttgactgcgcagaatccgactgttatgaaggaatttgaatcctttgcggatgcgattgtggttgattttggcgtggaaaaggaaatccttctggaactggcatccggggactttgagccaaatgggctgttgccctgccagatgccaaaggatatggatacagtggacgctcagctggaagatgtaccactggatatggaggtatatacggattcctgcgggaattcctatgactttgcctttggcctgaactggaagggcgtgatccgggatgctagaacagaaaaatatgctataaaaaagtaaaatacggcaggaaaaagggatccctggctctgtgcactattgaattttggcgtgttgcttccggtatgcagccggagtcatcccggtgcattgccggaacgtctccccaaaatagctttgagaatgaaagcccagggattctccaatttccgcaacagagggtgaaggtgagatcagcatattttttgccagctggatgcgctgctgcttctggtattcggcaatcgtcattcccatttccttcaggaatattttggaaagataatttggggaatagcctgcgatttcagcgagtttctgtaccggtattttttcggaaatatgaaaatcaatataatcacagcaggcgcgaatctgggtggactgtcctgcttcctgcttgcatttatggacccggttaacgtaatcatcctgcataatattggtgatggcagagatatctcttaaattgtctgcgtgctccaactgattgatatactgatcgctcagggtaaaagcagtttctgggagaagcccgccacggattgctgcccgggcacaaagagccgtgagaataatggtaagatttttataattacgcagagaatcaccatttccaatgttacctgcggttccggtcctgcgatagagctgcgacttgtttttatagtcaagatttccatcctcaatcagctttagcatccgtacctctgcagcataggtgccgtggcggcctatgttattcagttcgaagtttttaggctgcttgtgggcttccgggacaaaaaaatggattccactgtcgccaagcttttcacctgtcaggcaataacgcagcattcgtgcatattcttgaaaatgcatcagactgatgacagggatttccttgattttttcggtaaaaagtcgtttgtttgaaggggaaatgttcagcttccgtaatcctttttcaatcgcttttggtgaaatatcatccaggaaagcaggtccgataatgtagatcctgtagatattttctgcgtccagcgtgaaatcaatatcccatatcataccaaaggaatttcgcagaagtgtgttttccctggtcctggatagctctttctttagaaaatccttgtccatgtccagaaatagaacaatattaaaaaacaggtcttccggacagttagatttgattagattcagttcagcatcatattcccaggtgtacaaaggataattcagtaagatcagttcctgaaataatgccaggtttgcggcaattttttcattcatgaattcccctccccgctactattttccaaaatttctgttcttgtaatttatcataaattcgctattattacaagtaattttataatagaaagaaaaacatttgattgattataaaaacagcagattaattataacatgaatacagacagtattatataatggagcgtataaatccgctgaacgccttagagtgtgtttgaaaattcattcccgcaatctgcacgctccactttgcggcatattttcgccttattcggttgacgtagcccgctacgccgccctcattcggtgaaaatctcccacaaagttggacgcacatcttgcagaaaggaattttcaaacacgctctaggaaaatcataaaaaggagcatagaaggaatggaagatgagaacaactatcaatttagaaaaaatattgactatacagaatttttctacgaggtatccaggtgcgggaaaggaatcctgtttcaaacagaagagggggatacactaaatttgaaatcagagctttccagatttgtttttgtagcaatggcaacggattcaaggctattattgaatggaagtatcagatgtgaatcatctgaggatgcagagcgactggaaccatatatatgtaagattggataaaaggaggaagcgacagtgatttacggaacgaatttaaagacaaatggcctgtgcatgccgccaagtctgacgcctggaaaacttcgctttagttgggtggcggcaggaggaaaaaggcagagtgcctaccaagtgcaaatctatgtaaaagacgaattgaaatatgacagtggccgggtggagtctgatgtgtactatcatactccgtcctatcagccgcaaggacatttgcgggtgtcctggaaattggttttgtgggacggggatggtgtacagggaaaagagaacgggagctggtttggaacagtaccggatccgtcggagtggaaggctgactggatcgacccggagacagagagaccgtggcttgagattttgccggttccaggacaggaaaacaatccaaatcctgctgcacggatttgtaaggtggagcatcgaaggcctggctcttatttaagaaaaagttttgccgttaacaaagagagcgtttcagatgtatggctgtatgcgacggcgcatggaatctatgatatctggttaaatggcatacatttggacggatggcttcttgcaccaggaccgagccaatacaagaagcggctgatggttcagagctacgaggtttccgggctgctaaaagagggagaaaactcaattgtagtaagcctgggggatggatggtaccggggaagtgtcggaaatgatatggatatcaatacctatggggatgatcttgccttcctgtgccagattatggaaggagatacaattctcttaaaaacagatgagacatgggagtgcagcagcaatggaccgctttttttaaacgatatgatgcggggagaaacgtatgatgcggaaaaagaaacgttacttgtgcaaaactcaccggatctatggtatccggcgaagagccgggactatgggtacagtcatctgactggaagtgactgcccgcccattttgaaaaaagaacggtatcagcccagtatcattacaactcctgcaggggagacggtactggatttcggacaaaattttgcaggctttgtggagttacatatcaacgcagagggcggagaagtcatccgtatgacgcatggggagactctggatgagaagggaaacttcaccattgcgaatttccagaacttccagaaaccggagtgcgcgcagcttgtgacatacacctgtaaacagggagaaaacgattattacccaacgaaatgttattttggattccgttatgtgaagattgagacgaatctacctgtcagggaagaaaattttactggcatagcgatttattccgatatggaggagacagcctgctttcattgtggtagcgaagaggtaaaccaactgttccagaataccatgatgagtatgaaatctaattttatcggggtcccgacggattgccctaccagagagaaaagcggttttaccggagatgcacaggtgttctgtgatacagcgctgtacctgatggattcggcgccggtattcagaagctggctaaaggacgtggcggaaggttttctgccggacggcgggctgcgccagatagctccggataaccgtgcgcctggttattttgagagcagcgcaggctggtgtgatgcgattgacatcataccgtggaaaatatggaaaaatcaaaacattcccgacgtagcggaagaagaatacgatgcaatgaagaaatgggtggatttttcgattgagcgtgcaaaggccactcggccggaaaatgagaaccggatagaaaaggaacttctcccatattttgtggatatgggattccactggggagaatggatggagccgggagcggatgcgatgcagacaacaatggaccatatgcttcacggtgaaccggaggtggcaaccgcctatctcgcttacagcagcaagctgctttccgaaatggcagatgccctgggagaggcggaggacgcaacgtattaccattatgtttcgctgatggcacaaaaagcatacaggcaggcttttcttccagaaggcaggattgatgccgaccggcagtgcctttatgtgagaccgctggcgttggggctgctggatgagaaggagcggattcctgcagcacaggctctggcaaagaacattcagaaaaacggcaatcacctgaataccggctttttgtctacgggtgaattgtgcagagtattgacggattgcgggcaggtcagaacagcatatgatcttttgctgcagccggactgtcctggctggctgtatccggtcaaaaagggtgcgaccacgatctgggaaaactggaacggtattgccggggatggaacggtgcgggattcgctgaaccactattcttatggggccgtgtgcggatggctgattgaccgcgtgtgcggaatccgggtagaattcggcaagatccggattcagccgtacccggatcgaagacttggatttgcggatgctggatattgttccccccttggtgtggttaagagcggctggagttatgaaaaggatgagcttttcataacggtggagattccggccggacagcaggcggaaattgttttgccagacggcacgaaagaaaagaaagaaggcggaaagtgggaatatgtgatccgggcattttgattgaggaaaaagatggaggaaacagcgatgaagaaatttgaaaaaggttttttggttggtgcgtccacagcggcacatcaggtagaaggaaataataaaaacagcgatttctgggctatggagcagatggagcatacgcggtttgcggagccgtctctggatgctgtagatcactacaatcgttatgaggaagacattcggctcatggctgccgcaggactgaatgcttaccgcttttcgattgagtgggcccgcattgaaccggggaagggcagatatgatgacagggaaatcgagcattatcggaatgttttggagtgctgtcttgcgaacagcataacaccggtggtaacgatgcatcattttacaacgcccatatgggtaatccgggagggcggatgggaaaatgaggagattatcacctggttttccgattattgccgctatgtggcagagaagctgggcggccttatggagtatgtctgtacgatcaatgaaggaaacatgggactgcagcttgcggcgattatccgtgacatgatgaaacagctgatggcaaatgcccaggtaggtgtagatattgaagccttgaaaaagcagcagggagaaaatctggaagcccaggaatgccggcaggtatttggaacggatcagccacagggatttctttctgtccggacaaagaacggagattccattatcatgaaatcccatgcagcggccaaaaaagcgatgaaggaagtttgtccgcatctgaaggtaggaatcaccctttccctgtttgacatccaggtggaagaaggcggggaagaattagctgcacagatgtgggaagaagagtttcatcattatattccttatatcaaagaggatgatttcttcggcttacagaattataccaggaaaaacgtggtttctgacggtgcgcttcctgtaccggagggagccgaattgacacagatggattatgaattctatccgcaggcgttgggacatgtgatccgcagagtatatcaggagcttgggctgcccatcatggttacggagaatggcgttgctgcttccgatgatacccgtagagtcgtgtttatcgacgaggcgcttgccggggtgcaggagtgtatggaggaaggaattccggtgctgggctatctgcactggtcactgctggataatttcgagtggcaaaaaggattttccatgaattttggtttgattgcggttgaccgcagtacacagacccgtattcctaagaagagcctgtaccatttaggaagctatgcggcggataagtaaaatgtgaggagggaagaagaggatgaactatacaaaaaaagaattaatcatcccctatgagaagggaaattaaatgcagaacaggcacagagaattatcggatttttggaacacaaccaggggtaaaaatgcccttgagtaatcgatatgtcaaatgaaaggagaaatgtaatatgagtaaaaaaattgatgagcggcttccaagggaaagcggggccggaacactgaaggaatttcctgcaatcaaatctccctgggaaaagatggtgggctatcgtgatgcgatgcactatatttccagatatgatgcggtactgagcgcggcagtgatgcaggcattccgtattctggttccggaatataaggagcgcgcacaggctttgtgccagaatgcctatcagaggctgtattatatccagtcaaactttggaatgatcggagtagaccagatgaacatgcatcctttctgccgcgggaattttatcggcggcctgacgggcgattcgggtgatgagtctcttatgatgtgcggccgtgtgcaggacttcggtacttaccgggtagaaaaggaactggatgtctgtgactgggacatcgtaggttcggaactttgccgcgcaaccacccagtccctggaggcaggctctgtggcccactctcaggcccttcgccctggcccacatctggagtatcatatggtagaggcaaaaggctgtggagaccgtcactgccgtattgttgcagagtgccgtgagaaatatccgatgcctcctcatgagcagtgggaatgctttggcccagttgccacggaggatcagattaagtatacaacagaagaagagtgtgtgaaggaatcaatggtatttcgggaagagtgtaattataccttcacaaatggcacaaatgtggagatggattccagttcgattgctccagccctggctcagtcctgtgccgcatcgctgtacatacttcctacaattgatgcaatgattaaagcgggaaagctggatgaaaatttcgtgatgcacgtgatacgctgcgtctgtgaggccgcaggaaaagctgcttttggagaaggctatgcaaaggaagcggcgagaacatggctgggagctcctgttggtctggaggatggcagacttatgggtggacacattgaaatgtatctgcagggaatgatgattccgtatgagattgaagcttttaataaagatgaagtgatttatgtaattgaacgcagaaagctttgcgctttttcacctaaatttgtcgatgcacatctggcgtactggtatggtatgacaaagacgcttgtgaatacacagtggtcactctgggaagagaagggcgataccgcgccggataaactgcgtatcaagattgcaaagaagattgacaaattctgctgatggcagacgtaaagaaaggagcttcggtattatgtacaaaaatatatataaatatgatgaaatgaaacgaagagagcacatggcggttcgtgagaatgtgggctggtatctatggacgcatcaacttgttgaagtgagtggaccggatgcgactactttcctggacaggctgtgctgtaaaccgattgcaaatgttaaaattggcagagaacgttataccacaatactggatgaaaaagcagagatcattgatgatacggtgatattccgtctggaggaacagaagtattgggtatccacattatttgccacatatctaatcaaatggatggatcagcagaagggtgcatatgatgtttcctatgaaaacgtgacctccagataccatatgtatgcggttcagggagcgaaatccagagatatggtaaatgcaatggttaaaatgccgattgatgagctgaaattcttttcatttgcggaaaatgaaatagaggggattcctgttcttgtcaacagggccggatttactggcgaaaaaacaggctatgagatttatgttgcggcggatcaggcggactttatggaagcacagctgaaaaaaacaggggaaacctttggtgctgtggaggttacggaatttcaggtcatggcgtggactttgccgacggaggcgggtttttactatatgagagatctccggcacacaaacccgctggaggtcggacttgataaaggaatcggatgggagaaggactttatcggtaaggaagcgctgttaaaaattaaagaagaaggtgcggcaagagaaatggtgggattttccgtggatgaagcggatatttatatcagaagcaagcatctgggcggacctggagaggctgtcctcgtagatggagaagaagtcggccgcgtctcaaaactggtttacagctatgtgttagataaaaatatcggatacatacttgccaggaaaggtgctttgaaaaacggtgacctcgtgaaaattcatggatttgaggctgtgatcacaaccacgaattttcttgaacagcaataaattttatttttaggaggataagactatgggatttaatgcggctgctatgtcagaaggaatcatgagaagttatattaccgatacacttcctctggaggagatgctttatgtgaaaggaaaggcagcaatcgtaacaggaggcacatcggggctgggtttctgcgttgcacagcgtctttgccagggcggagcaaaagtggtaattgcgggaactacggaagcaaagggggaagcagcaattaagcttttgaaggaaaaggattatgaagtatccttttgcagagcagatgtcagaagtgaagcagatgtagagcatttggtagcgtttacagcagaaacgtatggttcagtggatattctggttacgtctggcggctcctggagctttgcccacgtttatgatatgccggaggaggaatttgtaaagacgattgatattaatctgacgggagccttccgatgcgcgaagcacgtgagcaaatatatggtagaaaataaagttgcaggtaaaattgtatttgtttcctcaaactgcgcctatacatcccagccggtattcggaggctatgcccattatgtagcgtcaaagggtggagtgattgcgatgacgcaggagctggcaaaggaattgaagcggttcggcattatggtaaatacagtcgcaccgggtgcaatgcttactccgggagccttaacaaatggtccggtccgttcacttgtaccggaaaaacagatggagatgggcaaggaaatgcgtattgcccagacggatggtgtgccgtcggctgacagtgttgcgattgttatttatggcatgtgcacgaaaatggcagatggcgttaccggagagtgcgttgtggctgacggtggcatgatgaggaatattatggcatatcaaccggcggttcaggcttatccgccggaagaggaaaagacagaaaagtaatttgaaccgcagatggaggaaatagcatgagagaagaaagagaaaacggccagagtttagaagcgtgtgcgcgtgagattatcagccggttgactccagagcagaagatgtcgcaattgaactgtatgtttgcaggagggcagataccggcggcaattttacatcgttttgtaaatggtctgggtgcgcttgccgtaatgcctgcggacaaacgaaaagaggaaaatctggcggcggctgaggaagaacagaagattgtaatggaacattgcgggattccggcgctgcgccacaatgaagctgttacggggttgatggctgcggatggaacaatatttccatccgcgattggcctgggggccacatggaatcccaggactgtgatggcaatggcggatacggtacgaaaacagatggtatctgtaggaatgcgtcaggcattatcgccggtcatggatgtggcaagggatccgagatggggaagagtgggggaaacatatggcgaggatccaacgctatgtgcggcaatgagtgtcgcgtttacgaaaggcctgcagtctgatgatctgaaaaacggcgtgattgccaccggaaagcattttttgggatatggtatgagcgagggcggattgaatatggcagtaaattcgattccgccgagggaacttcgggaggtctacgcgaagccgtttcaggcggcaattacggaagcagggcttgcctctgtcatgaattcctatggggtaatcgacggggagatggtcattgcttccgaggaaatcttgatgaacttgcttcgggaggaaatgggatttgacggtgtggtggtatccgattatatgtccatcaacaaaatgacagatctgaaaatcagcgaatctcccgaaacagcagggctgcaggcattgaaagcaggattggatctggagcttccgacaccttatggatacggcgccagacttctggaactcatcaaagaagatgagaaagcacaggcggatttcgacagggcagtacaaaaagtgattgaaacaaagctgaaactgggtttgtttgaaaatcccgcaggccgaaaagagctgctggaagaagcatacgaccggaacaagacggaaccatatgcgctgcaggcagcaagggaagcaatcgtacttttgaaaaataacggaattctgccgctgaaaaaagagaagaaaaaaattgccgttatcggtccacatgcggattccatccgtctgctgtttggctgttatacctatccggcggttgtggacagggacatttccggagccttgagtgatatggcgggaatggaaagtatgcagagggaaaaggtggagaatccaaaccagatgccctatttcccgggcagcaggatccgcggaacctcatccgttgtagaggaaacgctgaggaaggagtttggagaccgaacacagacaatcctggaggcaatccaggcaaaatgtccggatgcagatattgtatatgaaaagggctgtgatgtggctggaaatgacataagcggctttccggcagcagaacaggcggcaaaggatgcggatgttgtaattctggtaggcggcggaaaatacggctggggatcaaactgtaccaccggagagggaattgatacggataggattggcctgccgggcgtgcaggaggaactggcaaaatgcattaatgcgacgggtactccggcaatctacgtacatatggacgcaagacctttgtccagcgagtttattgattcccattatgaggcagtgctagagaattggtatcctggagataccggcggaaaagcattggcagacgtattattcggagattacaatccggcaggaagactgccgatgacagccgcgagaaatgccggccagattccaatctacgcatcgcagaaaaatggcagtggttatcatggcggaaacgggatggtattgtgcaaatacgtggagggtgagaaaacaccattacattatttcggtgaaggcctgagttataccgagtttacatattcggatctgaaagtgcaggaaaaggttgctgcagattcgtgtgtagagctgtcctgtatggtggaaaacagcggaacgtgcgacggagaggaagttgttcaggtctatgtaacggatgaaatgtcaagtatgatgcgtcccgcccaggaactggcaggattctaccgtgtgaaactgaaggcaggagagaggaaaagcattcacttttccatgcgggcagaccagtttgcgtttttggatcagaagatgcactggattgtagaagaaggaaggatgactgtaaagattggcagttcttcgaaggatatccggctgacaggcgctttcgaaattaccgggaacatcggtatagatggaaagcaaagaggtttttatgcaaaggcgtgggaaggaaaatagaatgacggtattttctatgatgtataagatggataaaacctttccgcagatacaggaggatttgaaaaagagacagaaggagggagagaaatgaagataacggatgaaatgtttcatcctgaaatcagagaaatgctgtcaagtcttccggcggaggtaaaagaagggctgcgcgcggtgaaggatgaagagggttttcgctcgtttcagagaatggggatgtatgataaactgacatctgaccggatatccgtgtctgaaatagaaatatccagagatgacgattcaaagatgaaagcgcttcttttaaggccccttgaggcaaagaatcatgtgcctgggatgttatggcttcacggcggcgggtatgtaatgggctctccgcggcatatttttaccggctcggttgcagagaaacttgtctatgagacaggatgtgtgatgctggttccggattattctcttgccatagacaagccttaccctgctgcattggatgacagctatctttccctgttgtggctaaaagagcatgcacaggaatacggagtcaatcaaaatcagatttttgtcggcggggagagcgcaggaggcggccttgcagcggcgctgtgcctccgtgtacgggatacaaaggctgtgcagatcgctttccagatgccgctttatccgatgctggatgaccgaatgaataccgattctatggccggaaatgatgcaccctgctggaacactgagacaaaccgtaatgcatggaagctttatcttggggatctatatgagggggaggttccgccttacgcagccccggcgagagtaaaggatttttcaggacttccgcctgcatacacttttgtaggcagtatagagccgttctatgatgaggtggtgaattatttcagcagtttaagagaggctggcactgaggcagtctgtgatgtatatgagggctgttttcatggatttgataccatgttcccaacacttatgattagcagggaggcacagaataaggcggtggaagcttttcgattcgctgcggaaaactatttctcagaatattaaaaataatggatatagtacgaaaaaagtagtgactctgctgcagaaattaattttgacctatagtatatacatgatggcatttgcgaggttacgattaggatctgtgggaaatgcaataccagtttttcttgatatccgcaactttatttagaaatcgaaacacaaaaagatttcgaggtattaaaggtgcacatataaagtaatacggatagaataatgagcagtattagtggataaaattttattttaaatacgagggaacttatggtgaaattacctttttaaacctcctttttttagaaggcagttatcgtaatagaataatttttcccataaaagggacgtggatagtaaatgaactgtccacgccccttttttctttgacagtattctacagcattttattaggaaaaaagaagaatgttatggaatgctgtcgaattattttgctgaattttcagcttgatccgcatagtattaaattttagaaaaattttataccttttcctcggaaacggctgatttttgtcaaagatgcagatcgccgccttccatttcaattcgccgcaaactgaccgaattgaaatggaggacacaatgggatttaattatgggcgtgaaaaacgcagatttgatagagagtgggagcagctgcagaaagagtatgctgccgcaagaatggaagaggcagatattacccgcatgaaagaatttgactgggaatggttttgtagcaggcgcacttacgagaaccataaccaggcgctaccggacgaagaggacttagaagcagggaagacacttcttttccaaaaatttccgaagctgtcggcggattttgagcagcaggaattttcagaccgatcagtttgcaagggtatttgtgttacaaatttatatggatattgcctggggaaaaggaaaaacgtggtgagatgactacagcggatatgcgcaaagtgttcgataaaaagtacaaaatgaaagaatagagggattgttatgacattgaaagggacgtctcctacgttctagataaaatgaaccgatatgcctgggaaaaggcgtgtattgaagaagtggcaaagaaattttcaaaatatcttgccgaattttggaaagtgcatccatatcgagaaggcaacacgcgcacgatagttacatttggaagccagtttattgaaagcaaaggtttttatatagacagcgatttgtttaaggataatgcacaatatatgcggactgcgttagtggcagcaagtgcggtctttgaagatttaggagacaaacgcaagccagagtatttagaagcgattattgcggatgcgctacaacgcagaaatgagatgaaaaggcgagtaattgatgtaatacaagaggctggatatcaagctacggaggaaaagatacgtgcagttgttttttggaaccgatctgcacagagggaacataatgccaatgaagtttttgtatatttggggggagaaaaaaataaagggagccattgctgacagaaagaaggggctgtcgggaagagaatggtcatagaagattgtatatcttccagatatgtaaactataaagataccatcaattttgttgaattttcgacactacacaatatgagaaagccagcgttacaggggaaaataatcttgtaacactggctttatttttatattgtttctccggtatgtctcattttgaattgtcctataaaatcacaatccaaagcatttcctatttcaattaattcccaggtattttaaattctatttttatctccccattcacacatgccatctaaaagggggatcaatgacttcccgcgatctgttaaactatattctacttttggagggatctgcggatattcttctctgtgtaccaactgatccgcttccaattcttttaatgtggagctaagtgttttataggaaatttctccaatatattttttcatttcgttaaaacggacaatgccaaattccataagggtatacaggatcgtcattttgtatttcccgttgatcaaggataaagtatagctgaaaccggttgtttcgaggcattcttgtgatatacagcgttcactcatttttatactctcctttaggtaagtatataactcttgtgctagtatcgcacttaaatgtgcgtacttgtttttggtttcattctagctataattataatatcaacagcagggaatgtcaatcctgtagataaaccctaaaggataccataatggccatggggccaaatcagatgtagatctaggaggaatcaacatgcaaaactatgagcatttaggaaagccgttccaaataggcagattggtcatgaaaaaccggttttgtatggcaccgatcggtggagggcagcatcatcttccgggcggcggcctgaaaaacgagacaatacaatatcttgtagagagggctaagggtgggtttggcctgatctttaccggggcgatggcggcggatggcacggttgacccgtatactggtgttggcccgactattttacagaatccggatgcgtttaaaatgacggcagcggagttgaatgaaagagccggtgcttatggcacgaaaatatttgcacagatcactatggggctgggacgcaattacccggatcttccggcgccatcgtctgtccatgtattccggcatccgggtgcggtgtcaccggagctgacccgtgaccagatcaaatcgaagattgaatctgtcataaaagcatcaaaagtggcaaaggattccggtttttccggagtggaggtgcactccatccactggggatatctgcttgaccagtttgcgctgtccatgatgaaccaccgcacggatgaatatggcgggagcctggaaaaccgtctgcgggcggctaaggaaatcctggaaggcatcaagcaggaatgtgggagtgatttcccggtcagtatgcgcctgggattgaagactttcgtgaaagggtttgagcaggccagcttgaccggtgagaaagagattgggcgtacattggaagaagggattgagattgcgagactgctggaatcctacggctatgattgtcttagcgtagatacggggatttatgattccttctattatgcctgcccgcctatgtatatgccgaaagggtatctggtagagatggcggcaaaggcaaaggaagccgtgaatatcccaatccttgcaggcgggcgcatgaatgatgcggatatagcagaggcagctatccgggatggcaagatcgatgcagttgtcatgggacgtgcagccctggctgacccggaatatcccaataaagttctggccgggcatacggagaagatccgcccgtgtattggctgcaatcaaggctgtatcacaaggctccagcagggaaaacagccgtcttgtgcagtgaacccggtggcaatgcgggaagtgaggtatgcgctccgtccttgtgtgaaaccgaaaaaggtggtggtcgttggcggcggtgttgcgggcatggaggctgcgaggactgcggcaatgcgtgggcataaggtctttttatatgaaaagaatgagaagctgggcggcaatctgattcccggaggttcccacggtttcaagaaagaagtaagggaactgaatgcctggtatgagaatgagctgaatggccttccagtggaaatccatacaggtgaacggttacttccgggcagctccgtgatatgggtgcagatgtgatcattctggcagcaggttccgttccggttatgccaaaggtaccgggaatggacgatgaaaaggtatttggctgtatagaagcgtttgcacatcccgaaaaggtaggacagaaagtggtggtgatcgggggaggtctggtaggctgtgaaatggctctggattatgcgcagtctggcaaagaggtaacagtggtagaggcattgccgaagattttgtcggcaggcatcccttccccaatccccaacgggcagatgatccctgacctgtttgcatatcatcatgtgaatgtgctggtgaaccatcgtctgtccgctgtggaagctgggaaggttatcttggaaagtaatgggcagaagaagatgctggatgcggattcagttgtgatcgcggtaggtttccgtccggttccttccatggcgcaggaacttaacgggtgcaaagccgttatctatgagattggtgatgggcagaaagtgagcacgatccttcatgctgtatgggacggttatgaggtaggaaacaatatttaatagatcaggaggttagttacaatgagagcagaattaaaagaatatcaggcagtagaagaagcggcaatgaagtttgtcaagagtgttgcagagggcagcagcaaatatgcgaaggaattatttacggatgaggcggttttgtttggttatctggacggaaagctggagcatggttctattgagcagttttaccataatgtggataccgtacctggaggcgataatttcaaggcccgtgtggatgtgctgctggttgaggaatccctggctgttgtccgtgtgctggaagaaggctggggaaaccggatcgactttacggatgtgctgcttctgctgaaaatggatggggaatggaaatgtgttgctaaggcatataatcaaaactctgatacgattcaaaaataaataataggaaaacgtatgagaagaatagagcaggaggaaacgagtatgagtaaaaaaattgtagtggtaactggaagtccccgtaaaaatggaaacagctttgctatgacggacgcatttatcaaggcagccgagaagaagggacataccgttacacgttttgatgcagctttgaaaaaagtgggcgggtgccgtgcatgtgaaacctgcttttctacggggaaagcctgtacctttgatgatgatttcaatacgattgccccggctattttagaggcggatgtgattgtatttaccatgccggtctactggtattcaatccccgcacagattaagggtgtcattgaccggatattttcttttgttgtgggcggtaaggacatttccggcaaggaatgtgcattgatcacctgctgtgaggaagatgatatgtctgtgatggatggtgtgcgtgttcctatggaacggatgtgcgcgttgaataaatggaagatggttggcgaagttttgatctctggcgtattgaatgctggcgatattgataaaacggacggctgcaagaaggcggcggctctggccgatgtaatttagggagggaagatatgggtaagaaaattgttattttgaatggaagcccccggaagaaagggaatacctctgctttagctgcggaatttaccaggggtgcaaaggaagccggacatacagttacggagtttttccttgacagtatggatatccatggctgtaaaggctgctttggcggtcaaagcagcagggaatgtccctgtgtccaaaaggatgatatgatgcagatatatccggctgtcaaagagggtgaggtgattgtgcttgctacgccgctgtattattggaatatgagcggtcagctccggacaactgttgaccgcctgtttgctttggaggaaggagatggcaatcttttaagagggcatgaccgttcttcagcacttttgatggcggcggaggggcacagctttgaggatgtgctggtttattatgaccacctgatggagcatctgcgctggaaaaaccttggccatgtccttgcaggaggaaatggatatgtgggtgatattgaaggaaaaccggaattgaaacaggcatatgcgcttggaagatcgattcagtaaaacataggaaggaagtgatatcaagattcctgcccatagccgtgtagcaatccagtgcagtctgaaagaatattatgaggtaggcgaccattatctgtatatttgtgacgtggagcaggtttatggggatgaggcggaggaagcattattttcatggaatgggtatgcaaaagtcgctcctgcaaaacaaggggagtgataggatgggggtagagcttacggcagaacgctatttcgtctgttccttttctgatcgtccagttgagctggagaagatttatattatgttttcgttctacacaatccctgtgtctgataggcggaatgccagacaccaatgaagaacattacagtatcagtaaaaataaaataatgcatccgccgggatagtcccgtaagaagaggtttcttttaaagaccgtaaaaagttgaatattagctttatgcggtctttttttatatacattggaccgtctatcagtttttgcgtggctttactgcaaggtaaagaaaggaaagctgtatgtcaggtcgaaaaatcaaaattcggtcaggagagatggaagtctggatggaggttacagaagaagagtatcaaaactactaccgtccatggaggcagcagaagaggcgggagcagaggaaccgtgatgcgatggaggaatgtacggacgggtatgtttcctatgccatggagcaggtggagctggtaaagcagaactgcaaagacccggtggtgctgattgagcagagaatggattattcggcttatgtgccggagggatttgggactggggatttgctggttgtggcggacggggttgcatattttaaaatcagccggcttgacgtggagctgtatatggatttgaagcagccggagctggaggagcggatagaggcggtgcttttgaaacatgggattttttatgggaagagtgaggtctttattgagtcggagcagctttattaggtgctgtatgagatggaggtttgatggatgaataataaggtgaagtttaacatctgtaactgccactatgtgttgcagaagctgttggaggaggggaagctgactttgacacccccgtgctggtgccgggtgcggtttccctggcgctggaccaaacggggagccggagtctttttatgcggacgggattgagtattacatcattgccaacaacatggggtatgacggggatttggagctggcgctgatcccggagagcttccgcacggatgtgctgaaagagggggcggacaccaatgaggtgctggtggagaacgccaatgtgcagacaggggcttttgccctgctgtttgagtttggcggggacatccagaagatccggcatgtgctgtataactttctgccagccgtctgaagatcgagaacaagaccaatgaggagagccgggaggtgcagacggagacgctgacggtgaaggcgagggcccacatggcggacgggtatgtgaaggcgaagacggggaataagacggcgcaggccacgtaggaggatatggatgggttttgattgataaagaggtatattgcaggttctctttttggctggagataaaaaaatggatctgcaatatagttgacagaagcaaccatatttgatacaattactgtagttgacaaaagcaaccaataaaaggagtgggatatgaatgataacactgttatgaaaataagagattttaatcgtttttacctgtctgttatggatttttatgagaataattatctgggttccgaatattcaatgacagagtccagagtcctttatcagatttatgaacatgatgaatgcagtgcggaggatattgcgaagcagttacgtattgataagggatatctaagcaggataattaagcggtttgaaaacaggcagatccttcaaaggaagaaatccgaggtagacgcccggttttacaagatccgattaacagaaaagggaaagaacattaccgaggaactgattcaaaaatcgaatcaggggataaaaaggattattcggtcattatcagaaaaagaatgtatccagttggaggaagcgatggatatgattagcaggttattagcaggaaggagctaaactatggagattataacttatgagccaaaatataaagataaattcatagagtataatacagattggattgttgataattttggatttttagagaaagaggatgaggaaacatttgaaaatatagagcaagatatagataatggcgcgatgatttattttgctgttgaaggtgggatggtgcttgcaacatgcatggcaaaacatttgcaggagtgtacatgggaaatctgtaaactggcatctaataaacatcagaatcataaggggtgcggaagcgcagtatttgaggcggctatgcactgggcatcagaccatggggcatcaaggctgttcattctctctaacagtaaactgaaaccagcaatccatatttataagaagtttggttttaaggaaataccccttgaagattatgaatatgttcgtggagatatagcatttgaaaaaatcattgattgatgaagggtatcagaataaaataatcaaagaatgaaagaatgtatttacgtaggcacttgcttataacagcaggtgccttttttattacataggaaagttcgctgaactttcctatgtaataaaaaccctacgggggatgcacacaatgtgcaaaggaaagctgctttgcagctgcacattggcgcacaaagctgccaagcctctcataagtgaggggaggggggggagttgaagtgggcttgcccgctttgttcagcatttttatggagccagtgacggctccttttttcgtggaagaaaggcaggggaggagcgtggtatccagaatccagggcattacagttgaaatcggcgggatactacgaaactttctactgccttatcaaaggtgaataaggaaatccgggatacgcaggggcggcttaaggatgtaaacaagctgttgaagctggaccctgggaatacggagctgatagcgcagaagcacagacggttagtgagacgaaggaaaagctggaggctttgaagctggcgtggcagcaggccaatgacgccctggcgagagaggagatttcccagagccagtatgatgccctgcagaggaagattgtggagacggaggctgggactgcccagagggatgtggaaggtgtcgtttacgctgcaggagttttgagaatcagttgccggatggggagagggcgtggtatactttgatgaggaaaacttgaaattggccgagcagagcgagggatgattcttggccggcgggtcaagaagatgggctatgcaacaactttgaacttgtaatgtaagggagaaatacttaatgagttttgatacagatgaacttatagaacttgatttgaaacaaacgtcgaactatggtgatatcatacccaaaatacaaataggtcatgatttatttaaccttattgaaaataatcccagtataaataaagcaactaaaaactatttaaaagaaaaagcagtagtatgtcatcagaaaatcaaaatgatgctgtttgctgaaaaatgtgctattgaaaatttaaatgaatttgaaatcttacaaaacatggaaatgccttgccttcttggagatgatgaaactactttgctttatcatactgaaagtacaatcctttttgcaagaaatgcattagatgtagcagctactattttttactttatagcttttcatgaaaggagtgatagtttcaataaatttaccaagaaaatattgaaggatgaaagtaataattttatttatttgaaatcatatatctgtgaaataaataaacttgatgtacatgcttttcatttactctgtggcaccgagaaaggaagagcattaagagaccagattgtacatcaaactaatattagatttgattattatgagtataaagaaggtagcgataaagagaagttattcttagtgttagataaaggcgaaattgtgatcccttatagagaatttatgagaaactttgttatggaagttctagaaataatatcatctatttcacaaaaattcatactcgacgtattaagaaatcaagtataattgtaatgagaaatgtaatcagacaaattccaggttgtagagctaaaaaatatgaatttgataaggtagagagattatgaaaaaagataaaagagagaaaatatgttttatatgttttctagtcccctcaatatgttattacattatatcaatagagaactttattgaaaagaatactactacagcagtaacatttttatgcttagggtcgttatctttatgtttatcaactaagcattggaataaaagtgataagaataataaagagaaataattacaaataccagttgtacataaagaataaaaggttacggagaacaattttatggactattcaacagaagaattgattgaagcaaagcggcagattgactcaactttgcacaagctgagagagactataaagacgtttgaggcgaaagagaatgcttcccgatataaatctcagattacactggcgaaaaggcgcgtacaggcttttgaaattgccaatcattttattgaggctgatattgaaaagaaatcgaaaaaatagtttctagtgaatcacttttcaacagaatagaattatttaaaggtatcagtcagcaatgattggtgctttttatgtgtcggaaaacggaggaggtgctgcttttgtatccggtgagcgaggcgttcctgcaagcggtgcaggagaacaccagtaggtattactggacagggaagattaccacaaaggccggggtggaggagacgaggcggcagctttgtgagaacatcctgttacgccagaatatcaggatatagatattcttacaggacttccgatcaaagtgtggtcgggttttattgaacagcatatcacagcggatgtggcgttcggtgtgtggcagtattacacgattatcggtgattaggactatatggatttgtcaaaatcttttgcacaggattttgtcggagggattatccgggactacaacctgacgcagattaaccagattcaggtatccaagcaggcggatatgaaggaaaaagagcttgcttacgatctgtttgaaaaatctacccagatggatttgggggacttcggatgttaggtggaaagcttagaatcaatcccatactgccggagcaatggacaaaattggcgtatcagatttactggaaaggacagcggctggcagttgagattacgaaagaggacataaagatagaaaatctgacaaatttggctgaagtatacctggaagttgcaggaaagagctatatgcttcatgatatactagtgatttccctgaagacagagtaaaggtactagaacagatatagtaaggtcaattggaagctatcgcagcttagggcaaaatatcataagaaatcgccgaaaattggaacttatttgagacgaaatcgggattgaaaatggtctcgatcacttaaggggattttgcctgatgtttaaatgtcagcgagagtcagggacaggggacacctaataagaatgttgatggcacactattgagaaatcagtggtgtgtcattttgcgttctggggaagaggcggcaagaaatgtggataatcctcagattatacatacagacagggggattcgggtgttttaatatagttcagattgtggtatattaagagaaagataatcggagtctaaggaggctggaagatggtattgagtacagaacgattactcctgcgtccgtggaaggaaacggatgcagagagcttatatgaatacgcaaaaaatccggaagttggaccgattgcagggtggccgccgcataagaatattgaggaaagccttgatgtgatacagaatgtttttaatggaaaagagtgttatgctgtctgcttaaagtcagacaaccgggccattggtgcgatcgaactgaaactgaatggcagtacggatatgacggataaagatgatgagtgtgagcttggctattggatcggtgaggatttctggggacaggggctgattccggaagcagccagagagttgctgcgacacggttttgaagatcttggtatgaatatcatatggtgtggctattatgaaggaaatacgaaatcaaaaagggtgcaggagaaggtgggatttgtttatcatcatacatgcaatgatgtgcctgtgccactcatgggcgagacaagaatcgggcatacaaactatatgacaagggaacaatgggaagctaatagatagaaaaaattggaagctgcagtatttcagtgcatgaaattcatcaggaggtgacagttatgaggctgtgcattgcattgaccgatatagcacattgaacttaacaaattttagttggaggaataaaaaatggctatatcggatattaacacgaactataaaataatagataggcaaaagtattaccggagcggtgtattcaggcatttttcggaggactgcaagtgttccacttctatgacatcacggataaatgtgacaaaacttaaagcgttctcagaagctgctggtacgaaattttatatcaattttctgtatattctctcaaaggtacttaattccagagaggattacaggatgggatacctttggcagacggaagaactgatttgttatgagcagataaatcccacgcagtatatttttcatgaggatacggaaacctgtacacctgtttatactctttatgacgagaattacaagagtttctatgagaagtgcgtgatggatataaaaaacgccaaggaaacacgggagtatcttcttgatatggtaaatcatccaaattggtttgatgcatcctatatatcgtggctgtcttacgattcgcttaatattgaacttccagatggacatctgttttttgcaccgattgtcaactggggaaaatatcgtgaggaaaacggacagcttctgatgcctgtcagtgtaagactgaatcatgcgattgctgatggatatctggttgcaaaagtgttcaaactgttggaagacgaaatatcagctttttgtaatgaacaaaaagattagaagaatcttgctttcgaagtgtcaaagttatttaattgtaagacagaaatttatcatagaacagcacctcttcggaggcgctgttctttttgcgcatttataaggaggagtcgatgaaactgcaatctattttaggcatcccgggtgcaagggataagccaagggacagttgcggcggttctgcttattcctttttgggggagaagcaccagcggggagacgggggcagggactgcccagagggatgtggcgtggcttgaggtggtgagcatttccgtgtctttttcagtctgttccaggtgggtgaaagggctgacggggtttaagtggaaggagaagatccgtgtggagtattttgatacggagacgctggagaggaagaagacggaaatgtatattttcgggtataaggcagggctggtgaaagacacttcttataaaggattgtggaaggtgtcgtttatgctgcgggagtttttagaattggttgccggatggggagaggacatgatatactttgggtacaacttgcaaattgtaaaggaaagaataatatatgaatttgaaaaatagattgggcatgataggttcgttaattaacgcaatatctatatttttattcgcaatttgtatgataataccttttgatttcggtagttattttgtatgtatatttttatcaataggttttattatgatgatagcggcttttgaagatgaatgtaatgaaaatacgagggctgcaggcaaaatagcgtcaatattttcaggggtatatgcagtattcaccactttacaagttttacaaatgccagcattgttcctgaaccagctgtttcaaagcctttataatacctttggattttatgctggttacggtattttgcacgaaagtagcaaaaaatacctgctgccggatctgttcacttagaaaaaaacggaattcctgcacgctttcttcacggtattttgaaaatgcctcatcctgataaggcagtatcttcatggcgctgtaagtgatgttgatcaggttgaccagcatttcgatccctttatgactccgcaccatatagctgcataatgaccagaatgttttctgctcatagtagctaatttctatgttccagcggaaaccataacagaacaaggggatgtatttcatccagccgccccctgtctggtttaaaggtgccttctcctgccatgcacagaaaatctgcatctgctccggaaaaatggtactgaaaaataggcgtctggaaccgccctctttctctgtggatgtgacataggcaaggacttcccttccactaaaaatatttgtgaggacacggcgtacacctgtgtaataatccccaatcttttcgtcggacagacagaaatcctctttcagtgaaagacgtttcccatgcttggcaggacggccccttttgccggtccgctgcggcgccaggtcgtaaatgacagagtcataccgtgcattacagatgaggtccagatccggatattcatccacaacgcatgtgagatttttcttggcataccagctgtcacacaggaggatgacattcctcttccctgaaaaggtgggcatagtctgacgcaccatagacgcagcaagctccagcttggtctcatttttctgccacatacggtagccaagggggacagcaaggtagacgatcctgctgttcttccatacagggatgcagagcataaggctgacaaagcagtgcccattcaggtaattagagccgttatgagctgcatggtcaaaaagcttcgacacatcctcgaattttttaccgaacttggagaccatggtgtcgtcaatacacaggaacacgggctgcagcttcaaggagtcagggaccagctttaaagcgatggatgcggtcacattcatgaagcgggaataatccactttagcataggaacaggcgtagtaaaaagcgttaagggatttttgtgttatgcctgataaaaaatgccggtaaaggaaccggatggaatgagcggattccatagccaggatggataaaaccagcaggaacagagtctcggcggtcggtgcagaaaaagtttcaaaataaataaaaaaatattgatgaagtctaccaatcaggttcttttcgttgtataataagtttgtcgtacagggtcactttccttcgtatattttgttggcaaacttattatacaccaaagtgctctgtacggcatttttttgtgaaaaagttgtaaagtggtgtgcagtattgataatgattgtatattatactcaatgtacgactgttcttaatgaaaacttgagtaatgaaacaatgaaaatcttaaattttaaatatatgggattgttatttaatcttgatctacttggctatgggattatggcactgtcaacattctttattggtttaacaatagatgtaaaaagtaaaaaagacaaagttctcaaatcacttttacttattcatggtattttctttatagggtgtttgattatgccgatgacgggaatatttgttaattctactggtgaaatctccacaggtggtgtgattgctctcgaattttggtgtttatattttttgcctgtcagcatactgtcatatttgcattttaagaatagtaaataggtgtgcaaatctcagtctgtgggactgaaaaattagaatttggtggagaaaatttgacatgagaaaaattgacatagtttgatctacaggaggtgtttgaaatgtgggtttgtccaaaatgcggcagggagtttgaaaaacagagtcaatcccattactgcggggatgcgccaaaaacaatagacggatatattgaagcacagccggaagaagtccagcaatatttattggaagtgcgcagagcaatatatgatgcggttcccgaagcggaggaacgtatttcatggagtatgcctactttttggaaagggcataacatcattcattttgctgcaaagaacaaagcggacaagcccgcttcaactccccatcccctcactcatgaggggcttggtagctttgtgcaccaatgtgcagctgcaaagcagctttccctggcacattgtgtgcatcccccggagggtttttattacataggaaagttctaagaactttcctatgtaataaaaaacacattggactatatgcaggggaagcggcggttattgaatttgaggaaaagttgaaaccgtataaaacaagtaaagggacaattcagattccatatcaagaacctttgccgctggagctgattgcagacattgctgtctggtgttgtaaaacgggaaatcatccatgattttaaaaaagggtaatacattttccttgcaaaaaggcaggttgtttgagcacctgcccgcccacattcccatttacccaataaaaccagaattttttttaattggcaagagtatgagagtatgttggattgtgctttgtcgaatccgttccagtcttttggcgaaggtcttcaaatgcttcggggaggtatttatagagtaattccttgttttaaaagtgcatttacaaatttcaggaccttttctgacgcatttgtggaataaagcagtccgtatggaatggtgtagttccagtttaccggaatgctgacaagagcaggatgtatatcttgccagcattcgattgtgaggagtacatttccggtttcaacgcagcggttgaaaacagaaatatcataaaagtgagaagtatcctcaatctgaatctgagggtggttttccacaaggtcacggcggacaagatcgtttaaggcagagtccccttcttttaccatcattaatgtttcaccatataaatcctcaatatttaatatttttttgtgcgctagccgatgatctcgggaaacagcgcacatttttttgtaatggcccaaaggcagcatctggcacttgttaagccacattttggaatcgcatacgcctaccagaaaatcaaattttgtccccagctgtgcgatttcagacaggattccttcatggttatcctcaaatgggacaagatgaagtttataattggaaaactctttgctgacagcataccataaatccatgaacggcttggcgggattcagcatggaagttcccacatgaaagaaatcatcctggttattcattgcctgttttgcattttcgatagaacgttttgagtaatcgaataaaaattttgcgtctttatagataatctctcctccgggagtcaaatgaaccccctgtggggtacgttccagcaattttatcccaagatgctgttctagggaattgatttgtttcatcacagcggttggggaaataaaaaggctttcagcagcttttgaaaaacttccgcagtctgcggcgcatacaaatgctgtcaactgttgattgaacatgagcacacctccaagtatgaacttaaagttaaaaccataataaccaatgggagattctttgtcaagaagtctcacgttataataagggcaggataagggaaaggagcaaaagatatggcagagttgatcgcctttttctcacgggcgcatgaaaattatgtaaatggtgcgatccggaatttggatattggaaatacagaggtggcagcaggtatcatccaaaagttgacgggagcagaagtattccgtatggagcctattcagacatattcaaaaaactataatgagtgcattgcacaggctcagtctgaccagagaagggatgccagaccggaattgaaatgttatccggagaatattgaaaaatatgacacgatctatctggggtacccgaattactggagcactatgccgatggcagtatttacgtttttagagcattttgatttcactggcaaaaccattcggccgttctgcacccacgagggaagcggcatgggacgcagcgagaaggatataaggaggctgtgtccgggcgcaaacatagaaaagggcctgcctttgaggggcggctgtgtggaaaagacggagccggagattgagaaatggttaaagcaaaattgctgataatgagaaaatcagggaatgtgccatgagatccgcgttgtggctgcggcatatggtgaaatcaaaaaataaataacaggaggaaaagaacatggaatttgtaactttaaaaaatggagtcaaaatgcccatggagggcttcggcgtatttcaggtgccggatgccgatgtatgtgagcaggcagttttggatgcaatcaagacgggttatcgcttgattgacaccgccgccgcatattttaatgaggaagcagttggtgcggcagtcaaaaagagcggcgtatcccgcgaagaactgttcatcaccacaaagctctggattcaggatgctggatatgagaatgccaaaaaagcattccagacttcattggataagctggggctggactatttggatttgtatctgatccatcagccgatgaacgattattacggttcatggcgtgctatggaggaactgtatgaagctggaaaaatccgggctattggtgtatgtaatttttacccggaacggctggcagatctttgtgttaacgcaaaaatcacgcctatgataaatcaggtggagctgcacccgttttttgcacaggagagcgctttggaaaccatgagggaattcggagtacagccagaggcatgggggccccttgcggaaggaaaacatggtatctttaccaatgaaaagctgaccgccattgccgaaaaccacaaaaagagcgtggcgcaggtggtgctgcgctggaacatccaaagaggtgtcatcgttattccgaagtccacccataaagagcgtatggaagaaaatctgaatatctgggattttgcattgagtgaggaggaaatgtctgcgatcaatggtcttgatctgggacacagcgaaattatcgaccacagcgcagcggaaacagcaaaatggctcaacggctggaagatccatgactgatcaataaaaaattcaggaggattttaacatgaacttagaaaaaatcagtgtattcccaacaggggaaaagaacgaagcgtatgcaaaatattttattggacagagctacttaaatatgctttcaacccagcaggtggttattggcaacgtaacctttgagccgggatgccgtaacaactggcatatccatcatgcggacaaaggcggcggccagatcttgctagtcactgcggggcgcggctattaccaggaatggggcaaatcagcccaggaactatctccgggggatgtggtggtgatccctgccggggtgaaacattggcatggggcggcaacggatagctggtttgcgcatctggctgtggaggttccaggagaaaatacgcacaatgaatggctggagccagtgtcggacgaagaatataggaagctgataagatgagcaagggaggaatcaaaatggtaaaacagacggctgggcgggattcgttaggaacgtttgcccctaaatttgcagagctgaatgatgatgtattgtttggagaggtatggagcagagaaagggaactgtctttgcgtgaccggagtattgtaacggtggtggcgctaatggcacagggactgacagacagctcctttcggtatcatctggagacagcaagaaagaacggtgtgactggaaaagaaatggcggagattttgacccacgcagctttctatgcgggctggcccaaagcgtgggcggcatttcgtatggcaaaagaagtatgggcagaggaagcaaaaggggaatgagaatgaagaaaatgctgattgtttattattcctggtcaaacggaaatacggaacgcattgcaaagaaactgcgggacgcaacggatgccgaactgttaaaaatcgagacggtggttccttatactggcagttatgatgaggtagtcagccagggccaggatgaggtgaatcgggattatcagccggaaatcaagccaattacagcacgagtacaggattatgatgtgattgcggttggaacaccaacgtggtggtattcaatggctccggcggtacggacgtttttgaacagtcaaaaatgggacggaaagctggtgataccgtttatgacaaatggcggatggcccggacatgtgatcaaggatatcaaaaaatgttgtaagggcgcggcatttatccatgaaaaggaaatatgttttgactccaatggcggggatagaatggaaacgccggaacaggaagttgatttgtgggctgcttccgtgaagggctgtttataggaaaacattgacgaactgaatggtccccgtggggagttttataagaacatgtttgcgaaatgtccggcaggccgtccggggacggcggatgaggtggcaaatgtggcggagcttctgatgagtggtaaaggtgcatttattactggagcggattttcttatagatggcggggcgactgccagttacttttatggaccgttacggccagaggaagatgcaaagctgggataaaggagacgatggcaatgagaaaaagaaaaattggggatttagaggtgtcagccgtaggatttggctgtatgggacttactcatgcctatggggcggcaatacccagaagtgagtctatccggctgttacgggatgcagtggaggctgggtatacatattttgatacggcggagtgctatcttggcacttatgcggatggaagtccagccaataacgaggaagtcgtaggcgatgcgctgcgcccggttcgagacagtgtggtaattgcaactaaattcggtgttgcacacggtggagaccatctgatcatggattccagtcccgaaaccatccacagggcagtggacggaagtttgaaacggatggggattgactgtattgatctttactatcagcatcgcattgatccaaaggtttccccggaggtcgttgccgaaaccatgaaggaattgatccgggaagggaagattcgctattgggggatttctgaaactgatgaggaatatctgcgccgtgcggatgcagtctgtaaagtgacagccatacagaaccgttattccatgatggcccggtggcatgaaaatctgtttccggtatgtgaagaacttaatgtgggatatgtggcgttttcaccaatggcaaatggttttctgacagatgcgttcaaaagtggggaacagtttgccgagggtgatttccgcaattctatgccgcagtattcgatggatggtcaagaggaaaatgccgcattgcttgagctggtgcgtggtttggcagcagaacaccatgcaaccccggcgcaaatatccatgtcatggatgctttgcaaaaaaccttatatcatgcctattcccggcacccggaaaagggagcggatgctggaaaatgcaggtgcggcggatgtcatcttagtggcggaagaagttgaaaagatggatgcgctgcttgacaatataaaaatgtctcaggtgtttggcggacattccggcaggtaaaacttagggaagaatcaaaatggtaaaacagacggctggacggcatttcgtatggcaaaagaagtgtgggcaggggaagcacaaaaaatgttgtaaaggtgctggatttatccatgaaaaggaaatatgttttgactccaatggcggggatagaatggaaacgccggaatagaaagtcgatttgtagacggtttctgtgaaggacagtttataggaaatcatggacgaagcagaatacagcggagtcagggcgaatctgggagcaaaactggaaacaatgtggacggagcagttgtcattggatgcatggatggagttgtaggatgggcaaattttctgttggatgaggcaaagaattttgttataatagaacgaggtttatggaggtatacaattatgagtgttcaatcggatgtggaaatgatgtcaatccgtgtgctggaaggttatgcacggctgcaatttgagttcgggaaggaggtacggcgtgactgaagggaagtatttctttaacggaaaatactttatgggcggagtcggcaggctacattgcggactgttattttgaggaggagaaggcagaagccggtgcagactgacgggaatccgttgacggcaaagaaaacctgtgtaactgtaatctttttgcatgggaaattccatcgcataattttttgttccggcggtagccgggagttaatatatgatccagtattggccggataaaatagagaaaggcgtcaaaaatcataggagtggttttttggcgtttttttgtcctttatacgtgtgacaaccgcctaaatattattttaaaccagaaaagaacactagcagaacaaaagggggatggcctgttcgattgtcgtaaagcctttacagttggaacaaattactttttatgatttgaatatgttgctgtcaaacctgatggataatgccatcaaagccgctgaaaagagagtgaaaaatggatggagctggtcatggagagaaacagggcatacctgcgaatcagtgtgaaaaatagtgcacgaggcaacccgatacaggagaatccactgttccttaccagtaaaatggaaaaagaacagcatggatatggaatagaaatcatttggaagattcttggaggtgcggttctaagtgaaataagaatgaaacggttatgatatacattgatttttaaggttcctgatgctatactaaagaaaatactttaataaagtataaggtggtgtgagatggaacgcaaacagacaacgaatatagaagtaaagaaaaataacaggaaccgtgtgtttcggtatatatgtaagtgtaaaacggtttccaatccggatattgcatatgaactgaaaatgagcctgcccacagtcacccagatcacaaaggagctgatcagccagggagttgtagaggaaaaaggagaattggaatccaaaggaggaaggcgggcaaaggcactgtcggctgcagtccacacaaagcaggcagttggccttgacattacaaagaatcatatcagccttgtattaacagacctttcaggggaaatattaaactatgtgcgtatttttcttccgtatgaacataacgagtcttattaccaaaaagtggaacaggagatggaaaactttttggcacacagcaatgcagactgtgacaggatattgggccttgggatttcttttccgggaatcattgatctaggtataaagatgatcacgtattctcatatcctggggataagaatgatcccgtttgaatccataagccgttttttcaagtatccctgtacatttttaaatgacgcaaatgcgggtgcctacgcagaaggaatctcttcggagacggcaaaacgctttttctatctgtcacttagcaatacggtgggaggggctgtttttgaccataatagtcttatacagggggatcactatcgctgcggagaagttgggcatatgacagtgattccagatggaaagctttgctattgtggaaaaaaaggctgtctggatggttattgcagcgcattaattttgtcaaatgaggcagaggggaaattggaacggttttttgatctgctgggaaagaaagacgagcaggcagttaaaatatgggattcctatacagggattttggctgtggcactaaataatattcatatgatgctggattgtgatattgtgctgggaggatatgtgggaagttttgtaaagccgtttttgccggacctatggaagaaagtgtcggaacgcaatacctttacacaggaggagcaatttgtaaaaagctgtaaatatcaggtaggagccgcagcattgggagcggcgctggaagtgatcgaaaattttgtaaaagagatatgaataaaccaggggtttccaaaggagagttcagaaatgaggtctcctttttttgtgcctttttactcaaaagtgacatttgattttgggtataatgatgaaatactgtttgtaaatagaaattctattgacaaatttgaagggggaacgtaaaataagaaacataataaaactatttaataaagtataaataaaagccaaataaaaaggagaaagaatcatggatggaaagatgaaagttgcagttatgctgggaatcggaaaaatgggttttgaagagcgtgatattccaaaagtgaaggacaatgaagttttggtgaagctggagtatgtaggcatctgtggaagtgacctgcattactatgagactggagcgatcggtgattatgtcgtggagcctccttttgttctgggacacgaaccaggggggaccgttgttgaagtggggaaagatgtcaagcatttaaaagttggggacagagtcgctcttgaaccaggcaaaacctgcggacattgcgagttctgcaaaaccggccgctacaatctgtgtccggatgtggtattctttgcaacgcctccggtggatggggtatttcaggaatatgttgcccacgaaggagatctttgctttaagctgccagacaatgtgagtacgctggagggggctttgatcgagcctttggccgttggcttccatgcagctatccagggggaggcgcatcttggtcagaaagcagttgttatgggagcaggctgcattggtcttgtatccatgatggcgttgagagcaagaggggtgtcagaagtatatgtggtagatattatggaaaagcgcctggagaaggccatggagcttggggcaacaggagtgatcaatggagccctagaggacatcctggaaaaggtgaaggagttcaccggcggcgcaggggcagatctggttatcgaaactgcaggaaccgagatcactacaagacaggccatccatatggcaaagaagggttcaaacattgttctggtaggctacagcaaaagtggtgagatgacacttcctatgagccttgtactggataaggagctcactttcaagactgtatttcgttaccgtcatatttatcctatagccattgatgcggttgcagcaggcaaggtaaacctgaaggggatcgtgaccgatatctttgagctggaggaagcccagaaagcaatggattacagtgtatataataaagcagatattgtgaaagctgttattcgtattggagaataagtttgggatcagccaatatttataaaggatcgggggattaaaatggagcagaaagagacaaatgtaaaagtgccgttgatcagtaagatcgcatatggcatgggtgatgtggggtgtaatttcagttggatgtttgtaggaaacttcctgatgattttttataccgatgtttttgggattagcatgggagcagttgcaggcttaatgcttttctcccgcttttgggatgccatcaatgatccagttattggcagcttgagtgacaagacacatacaagatggggaaggtacagaccttggctgctgattgctgcacctttgaccgctctagtgctgattttaaccttttgggcacatccggattggtcttctacttcaaaaattgtttacatggcaattacatactgtattcttgtattgggctatacgtgtgttaatattccctatggaacactatgcggggcaatgacccagaatattgaggagcgtgcgaaaattaatacgttccgttccgtgagtgccatggttgccattggcatcatcaatattgtaacggttcctttgatcagtgcccttggcaatgggaatgaaaagaggggatatttactgatcgcggtattatacggatgcatttttgcagcgtgtcatattttctgcttttcaaaaacaaaggaagtggtggaggtaccagaaaaggaaaaaatttccataaaggtacagctgcaggcagccatcaagaatcgtccatatctgattgctgtggcagggcagtttctgttcggcgttaccctttatggaagaaatgcggacgctctgtattactttacttatgtggaaggaaataaggtattattcagtacttattccatgtttattataatcccgtccatcattggtgctgcctgttttcctcttgtgttccggctgactaataataaggggcgttctgcatccatttttgcattgttgacaggaatcagtatgttctgtatgtacttttttacagtgggggaatcaccagttccattttatattttcgcctgtctgtcacagtttttcttctcagggtttaatactgcaatatatgccattattccggattgtgtagagtatggggaatggaaaactggacttagaaatgatggattccaatatgcttttatttctttaggaaacaaaatcggaatggccatcggaacctctgcccttgccggagttttggggatgtttggttatgtggcaaatgtacagcagaatacagcggtgctggcagttatcaaacattcctttacaacagtgcctggaatactttggattgtcactgcagtcgtactgttcttttaccgcctgaataagaaaaaatataaccagatcgtacaagaaatccagacaaaaaaagctcatcgctagtataagccacacgaaatagccttccgttgtaccggaaggctatttccatctgttgcgctgccagtccaaatcccctgaactatttgagataaatcaaacattcgtttactacagtcctttatgagaaaaattaaagataaataaattgagaatttctgcttaatatgttagactttatatattaagaagggggctgcccaatgaagtttattaaaaagtatctgtctggacggaagtggcctgcttttttcttcatatgtgcggtgagcctgacggttatagtgggtggatttcttttgtatcgaaacagcattgcagatgtagtggacagcactacgatttcttttatggagcagctggcagagcatgatatccgcaacgtaggcagtcaagttcaaagccggctgagttatattaaatcactggggaaacggctggagctggtacgtgaaggtgagcagattgatattccgtatttattgagtgtggatgtgcaggcaacgcagtttgaaaaattatattttattaccgcagaaggaactgtttatgatagttcttatctgaccacttccctggattcagttccatggtcggatatctatcgtaatacaacaaaagaatctgtctccagatttgtggttgataagcgtgaggcttggggggaatatctgctttactgtacccggatggaaactcctgttccttatcgaggggagttgatccaggggattgtagggcaggttccaatggaagaattggttggacttacaagccttgaaagctttgacgggaaaggcaccactttgatcatacagcccagcggggaaatcatcacggccagccggtattatgaccatgatggcagcttggactattttttagaactggagaagtctgagtttttaggcggatcgtctcttgagcagtgtaaaaacgccattgcccaggggaaaagtttttatatggagtaccgttttcaggacaaagtgtataatgtgatgctgaaacctatgggggaggaaagctatgataacggatggtacatcgtggtcaaggttcctttggaggttactgctgaacagacaggggtggtgatgaaatggtcccttctcttctttggcattttaagtatcgtacttatatctttggtagtatttatacttcaaaccatgcgtgctgagcaggcggcacgggcatcggagcgggcgaaaacaaccttccttgccaacatgagccatgagatccgcacgcctcttaacggaatcacaggactgatctacctgatgcgccataatctggacaatccacagaagcaggaggaatatctggagaaagcagaggtgtctgctgaatttctcaaaggtatcatttctgacgtattggatatgtctaaaatagagagcggccagctggagctggacagtcaaaagttaaatttagaaaagctgcttcgggatatagagatgctcatcggtccgcagaccgagcagcggggacagcattttaatatagaaagcagtgaattgacagtaccctgggtgtttggggatgaagtgcgtttgaaacagattattgtgaatcttctggggaatgccctgaaatttactccggcaggtggagagattaagctgtctgttatgcagcaggtacggggaatgacctcagagaccatgttcattatccgtgacacagggtgcggcatgagtcaggaatttttgaaaaagatctgggagccctttgaacaggaacgacggcccggttcccaaaacggtactggactggggactactctgagcaagattctggcggaaaaaatgggcggaagtatccgtgtagaaagtgaattggaaaaaggtacgacttttactgtacagatccctctgcctgtggcacagcaggaagaagaagtaagcgtggcccagactgacagcagagcagggatcgcaggaaaacatgttttggctgtagaggataatgatattaaccgggaaatacttacggacattctggaacaatatgatataaaggtcactccggcggtgaatgggcgtgaagcagtggagctctttaaacaaagtgaaccattttactatgatgtaatcctgatggatcttcagatgccggtgatgaacggatatgaggcggcaaaggcaatccgttccttagatcggcctgaccgtgccgtggtcatatttgcactgacggcaaatgcatttaaggaagaagcagaccaggcaagggaaagtggaatggatggagttttgacgaagcctattgatgtgaatattcttttacagaagatttccggtgtatgatcacctgtataaaaggggcaaagagatgagaagaaaatttaagctttttaatttcataggatgttttatgctgtgcatgctattggcaggctgcgccaaagaagaggagccgctgcaggaacctgtcactgtccggatcaaatgtccgcctatgaccatggcatatgacgcagagcacccggatgcagagatttatgacttgtttgtggaagcaacgcagaagtatcaagcacagaatgaaggcacagaagtgaattttattattgaaaaattccaatatgtagatgaaaaggagcgggtgattgataaatttggtacggatgaggcggcagatatcctaatgggagggtcctttaatattcccacgtatatactggaagggcggctggcagactgggatgacgtgattgatgacggattgaggtcggatattgatgaaaacatttggaaacagtgtatgtcggatggcagaacataccttatgcccttattccagcttcagaacaacctgatggtaaacgaggatctcatgagagcagcagggctggagaagtatattcctgaggagggaacaattgcccaatggtccacggaggaattcaatataattttggaaacattgaaatcttccatgacggaaccgaatgtattccccatgtttgcttatgctgccaataatcagggggatctgcatacgatgacacttctgcgggcttatggctgtcccatatacgatgaacaggggaatttcgccatccacactccagaagggattcaggcattggagtggcttaagaacctcaatgagaaagatatctcaccaaaaggagcagagaatctggaatttatggataatatggaattgttctatcatggacagatggcaatgtgcattggaaatcaggtcaatctcaatgatgccaggaatctgtatgatttgaatgtctttttggccaatttcccaagtccggatggaaacggatttgcaaccagttatcttaacgggttcacactctttgacaatggagataagaaagtgctggaaattgcaagggattttatccggtccatctattccgacaaagaacttctcagatattccttgtgcagtactccagtggtgaaatcttatgtggaagagcacaaggatgaagtgtggatgatggaggcctacagcaacaattccgaaaatattgtggattttctgaataatacacccaattgggaaggcgtccgctctgtattttatcctcatatacaggagctttaccggggaacgaaaacaccggaagaaatagcagctgcaattgataaaagctgtaacgaggagattgcccggggacgggatataaagtgaaatatataatgaataaaacctggagaacttctccaggttttattttagaaaattctcagagaataacctgtagaattaaaagtgtccaagcatatatttgagcagagaaagatcaacatgtgtttagaatgaatggaagaggcaaataatagatgcaagtgaattttgtattctttgatagataaatggaggagattatgagtagaaaaggaaaggtcatattaagcagcgttcttgcatgcgtgctagttttggcagcaggattattttggtatataaagatatcagctccccctggggaagagtggatctcatatgacagagaaaaagtgatcgaaacaattgacagccagcttcagggcatggacatagaacaaattgtcagggagaaagaaaaatatgtggtgggaaaaagtattcaggacattcagaattcggttaaagaagggaagctgaattatgaagagctgaccgctatctgtctccagcgtattaaaaccttggatcagaaggaaaaaggatataattcagtgatctctgtgaatgccaacgctatgaatgaggcaagagacaaagacgcagaatatgatggtgatcaggaggactttgtgggcatttatgggattcctgtcatgctcaaggacaatattaataccgcagatatgcccaccagtgcaggggctgaggcatttactgatttctatccagcagaggatgcacaattagtaaagaatttaaaagacagcggagcagttatattgggaaaaaataatctgtcagagttcgccaattatgtatccagtatcatgccggctgggtatagtggaaggaaaggtcagacggtgaatccttttgggccattaaaagtatcggcatatggctccagcagcggcagtgctgttgcggttactgcagatctggttcctgtttcgattgggactgaaacagatggctctatcattgccccgtcatctgttaattcagtggtggggttcaagcctgcccgggataagattccaggtgaagggatatttcccctgattaagaaaatcgatactgccggtccggtggcgaaaagtgtagaagatgcagccatagcctatcaggcagcgtcaggcatccagatatctctggattttcaaaaagacgctttaaatcgtaaaaaaattggggttgcagcatatgagtataatgaccaggacatgctcttaagcttgaaaaagaagctggaagaattgggagcagatgtgatcgacgtggaattaaattcaccagaggttgttattttcaacaatatcaggcttaccttcaaaaatgattttgaggagtatgcaaagctctatcagcttcccattaaaaccttaaaagatctattggaatataatcgccaggagccaaaaaggcggatcaaatatggacaggactggctggaggatgcagagaaaacagaggattcaaattcaaatgaaatagaccgttctatccagattgcagaaaatctattaaatatgctttttaaagaagaaggtttggatggaattgtgtttctcaacagcacaggttccacgcttccagctgcggcaggatacccagagctgactataccatttggaaaagatgagaagggcataccccagggagcaacctttgttgctcagccaggtgaggaagagaaattattgaatttaggatatggttttgagtttcatgtaaaaggacggttatctccatgaaaagaagataagtatccaaaacagcaggtggagatttctgtggagggatgttgacaaaaatcctgattcgtattattataagtacgaatcaggatttttccattgataaggagaggaagctatggaacgggaacgagatagaatccgcaggattatgactgccattaacaaaatcgatggtatttatgaaaacacatcaagaaaaatgggaataaaggcaaatgtaacatggatcttgtatgcacttgatgatgggaatccccattctcagaaacaaatctgtgaggaatggctcataccgaaaaccactctgaataccattgtcaaggagctggaaagtgaaggttatgtcacactggaatccattccgggacagaggagggaaagaaatatctgccttacagaagctgggaaggcctatgcaagacagaccctggactttctctaccaggcagaaaaggaagcctttgaccaggtcaatgagccggatacgttaatgtgtgagcttgaacttttcagtaaaatgctggacattacttttgcaaaaatagattttacgaaataaggagtattttttatgagaatccaattatccgggcattttacttatggtaagctgcttcgatttgtttttccttccattgtgaccatgatctttacctcgatttatagcattgtggacggtttgtttgtgtcaaactttgcagggaaaaccgcttttgcagccttgaatttaatctttcccttgcttatgatcctgggcgcccttggttttatgatgggcagcggcggcactgccatcattggcaagacccttggggagggaaaacggaaacttgcagaccaatatttttccatgattgttatcgtcacctttgcaggcggtctgattttttcaatggtgggacagctgtttatccgggacattgccatcttgctgggagcagaaggggttatgatcgagaaatgtgttctctatgggagaattctgcttttgagtatgccttgttttatgctacagtatgtttttcagaccttttttgtggcggcagaaaagcccaagctgggactgggggttaccatagcggcaggatgtacaaatattgttctggatgcactgtttgtggctgtgtttcattggggattggcaggggcagcctgggccactgccatcagccagatggtagggggcttattacccatgtggtatttccttagaaagaatgacagtcttctgcgtcttacaaaacctgtatttcatggaagaatcctgttaaagacctgcgccaacggttcttctgagctgatgagcaatatagcagcatccgttgtcaccatgttgtataattatcagctcataagactggcgggagagaatggggtggcggcttatggtgtgatcgcctatgtggcctttatatttgcggctatctttcttggatatgccgttggcagcgctcccattatcagttacaattacggtgcacaaaatcatagggaattaaagaatatgttccgcaaaagtgttctgctgaatctactggccggagcagttatgatgttgcttgctgtgagtacgtccaatctgctggcaaagctgtttgcaggttatgacccacagctctgtgcccttacagcccatggacttaaattatattctcttagctttttgctgtgcggctttaatatatttggctcgtcctttttcactgcattaaataatggaggaatttctgctgctatttcatttttgcgcaccctggtttttgaagtgggcagcctgatcattctgcccatgctccttgacctggacggaatctggctggcggtgtcggttgcggagtttgccgccttgcttgtcaccggaacctttctgatcatcaaccggaaaaaataccactacgcttaagccttgtgaaggaaacggcagatacttaaaaggcaagagacagaacaggcagctggtgataaaatagtgacagaaacagggatctggaaagacagaaaaaattcattggaaccaggaaaggggacgtttatgaatatagagatagagcaaatccgcaggtaccgtctcgctgtccaccatctggacaaaaagctgcccatggacaggctggtggaggctgccggggcctgcgggctgcagaattcacctcccggggcatgggagacagccctttttaaccgcttggaaggatgtaccattgacaggcttcaccgtgccctgtatcaggataaaaccctgcttcaggcctggagttaccggggagttccagtggtatttcccgcagaccagggggatgtttttcttaaacccctgatagcacaggagggtgaacagccctggatctacaccaggggaataacggcagctctggatcatctccagatgaccttcgatgaggttttcgggttggtgaaaagggcctgcaggtatttggacagccacaccgtccagagcaaggaaaccctggacactgtgctgtccaaccagatccaggaggaactgccttgggataaggcagaggcgtggaatgctccttccatgtatggaaatccagacaggcagacggtgggaggggcagccgtttcctttcttctgcgcccctgttccttttcctctctggtggtttttgggaagcgggagggtagtcgtccaacttttacctcctatggaaattggatgggggcggatatggaaatccatccggatggagataagaggcttgtgcggaaatttcttcattgctatggtccctgtacggcagacgatttcatgaactggctgggggcctgcccggcgcaggccaggaggctgtggaactgtgtcagagaggaaatgcagccggtgtctgtggggaaaaaggtatgttatatgctcacagaagatatggaggagctcctgtcacccaggagtgattgtggaagtttgatttcgctgggcccccatgacccttatctggatatgagggaccgggaggttcttctggagaacaaagccctgcacagagctgtatggactacggtgtccaacccaggagtcattttaaaggatgggcggatcgcaggaatatggaaaacgaagacccagaaggacaaggtggaactcacgatgaccttatacgaagagctcacagaacgggaacaaaggaagctctcagagcttggggaagcgtatgctgcttttcggcagctttctttaaaaagctgccgtatacaaggcttgtgagaaagagaaaaggattgcccagaccagcttcttcgtatataatgacacttaggagttgataatcattgggggagatacttatgtgatggatcttgcagatccggcagacgaggttatgggattcctttggtgctttccatagactccgccaattgcatacagaatggatgatgaatgagacagacccgtgggagaacacccgcgggttttccagggaaaagaggttttctcagggtaaaaagccttggtaaaacaagagcaggaaggagacacagatgctgaagatagcaatcgtggaagacgacagcgccgctgcccaaactctgcagggctttcttatgcggttcgcaggggagaacgaagagaatttccaaatcacggtttttggtgatgccttagggtttctggactcttataaaaaaatctatgatatggtctttatggatattgagctgccctttatagacggcatggaggctgccagacgtctgcgggctatggacaagcagattgtcctggtttttgtgacaaacatagccagatacgcagtgaagggctacgaggtggatgctctggattatttggtgaagcctgtgtactacggggattttgaactgaagctcaggcgggctgtggccaggtgcaaggaggcctcagacaccattttggtgatgcgccaaagtggggttctgcggttgtttctccaggaactgcggtatattgaggtccaggggcataagctgatcttccacacagagaatggtcctgtcaccggaaccggaactcttctggagacagaggagaagctgaagagaaagggatttcttcggtgcaataagtgttatctggtgaaccagaagcacatagcggcggtgaagggctactcccttgtcatgagcggtggagaggagcttcagatcagccgtccccggaagaaatcttttatgagcgagctggcagaagccatggggaatgggaatattttatgaatggattttttgatttttttgcggctaacggatttgtttttgagatgctgctttccgtagcattctttacctggtggatgaagcctcggacaggattttttattcgcggggcaggtgtgtgtgtagtcatgcttctggtgtcccttgcctggaataccctgcccattgacaatgcctggacaaaaagcatacgtaccattttatttttcgctctatgtattgtgggggttcaggtgtgttatcagatcgcagggagacaggctgccttttatgtgactgcggcaggggccgcccagcacttttcctttaaggcggcccggattatgctttcttttctttggtttttaggagaaccgcctaagcttgtgttgaatgtaggatatccacttttgctggtcctgtttttgcttctttgttatttgttttttggaaaaaagctgtgcagggaggattataattcccttacaagctctccggcagttctgcttttattgatcggaatgcagctttccaccaatatcttccagaacttgtttgatgagttcagtgccggatacggatatccgctctataccatttttaacctgttcgatattgtgtgttgtctgttcctgctctcccttcagtgtgagatcaccaggaaggaaaatgagcagcagaataatgagatcctcaagcacattctgtatcagcagaagcagcagatgaaaatgtccaaggataccattgatctgatcaatattaaatgtcatgatattaagaagcagatttccatgctgggaagccacattcccaaggaggagatccaggaactggagagagccattcatatttatgacactgcactgaagacaggtaatgaggcactggatgttcttcttacagagaagcttatggtgtgccagaagaagaatatctgctttgactggactgcccagggaagcagtctgtcttttatgaagcaggcggatatttattccctgttcggcaatgccattgacaatgccattgaggcagtggagcatataaaagaccccgagcgcagatgcttgaacatgaaggtgtggactgaaaaacagatgctgattatccattttgagaatttttatgagggggagctgtcctttgaaggagagcttccacagacaacgaaaaaggataaatgctatcatggctttggtatgaaaagcatccgcatgatcgccgaaaaatataagggatatctgtctgtgaaggcagagaggggaatcttcactttgaatattcttctggaaattccacagtaaatgtcattttgcgttgaaaaaattgcagtttaggaattacatattgtgcaggaagaaaaaagttgttatggtagcaccagaaaacgcttaccgacaggaaatcgtgatttttcttcgacaaagacggcgctttttcaggcgcctttttgtatacaaaataatattttaggaggggaaatatgtttagaaaaaccaatgtctggcgagggctgtccatggtgtcggcactgttgctgaccatctcattgctggcagccaacattctggagacctaccgcacatcggttgacgcgtttgtgggaacgcgcagccagaagaccgtaacagaggcatccgctgacggggaggatgcatggacttatcagtccgaatttaccacagccaaggaggcctatgagggatttcaggaatttgccatccgggcatcccaggaaacctttgcactgttaaaaaatgaagacagcgctctgcccctgtcagacactgcaaagatcaccttgatgggtgtgcgcagctatgcgcctgtgtacagcaacagcggcggcagtgttgcagatggaaaatctacagtggaaatttttgatgcctttgcccagagaggctttcagatcaatccgtccatgctggcggcctatgaggcttattttaaggataagaaatggaccgtaccccaattcggtggcgggatcctgccagagtatgcagagatcaccgcttatgatgacccacatgaactcaccctagaggagctgagccaattaaatcctgattatagcaaggattatgaagcttataaggatgcggccattgttgtggtgggacgtcccggaggggagggcggaaacggctattaccccggtgaagaaggacgggcagagggtgtagagaccgtgactggaaacattctcagtttgagccaggaagagatggagatcattgaggaagcgaaagccaattttgataaggtcattgtacttgtgaacgctgccaatcctatggagatcgccaatcttaaggatgacccggacatagacgcgatcttgtggattggatttccgggggcctacggcttctatggagtggcggatgtgctcaacggcaccgtatctccctctgcgcacttaggagatacctttaccaagaacagtgctttggccccggctatgcagaactatggggacatcccctgggaaaatgcgggaagcttcccggaaaatgccaatgtaaattcttatcttgttgaggcagagggaatctatgcaggctaccgttattatgaaacccgctatgcagatattgtattaggaaacggcggtgagaaagcatccgcaggaacctatgccaatccggacggaacacctgcacagaaggatggaacctgggagtatgccaatgaggtggtttatccttttggatacggcctttcctataccacctttgaacagacgctggattctgtgagcgtggctcaggacaagaaaacagcggaggtaaccgtgaccaccaccaatacaggagatgctgccggcaaagcagtcgtccaggtatatgcacagtctccttatacggagtacgataaagagaatcatattgaaaaagccggtgtccagcttatggattttgaaaaaacccagactttggagccaggcgagagccagaccatcaccatggtacttgacatggcaaatctggccagctatgatgcagaaaatgcacagacctatattatggatccgggaacctattatctggctattggagaggatgcccatgatgccttgaacaacattctggcagcccagggaaagacacagaaggacggcatgaccacagatggaaatgccaagagctgttatgagtggacctgggatggagaggcagacacacagaccttctctgtgagcaagaatggaacacagatcaccaatgcactctcagagggtgactatgccatggatattaatgccttcttgccagacaccgttacctatctgtcacgaagtgactgggatggtaccttccctgagacttgttccggacttacagcggatgagaacctgtcacggctgctggggaatgatcttatagaattaaagaccgaagaggatacctctgatctgatatttggggatacgtccagcgatttgaccattaatgatctgaagggtgctgattttgacgatccccgttgggaagagctgatcaataaggccacggtggatgatttcctgaattttgcatccaatgccttccacaacattgccgccattgactcagtaggactgcttcagtataccgccgacgatggccccaatggttctgattcccactaccttacagagggctcctatgagggtgtgccttatgaagatggggcagaatatgattatggaacccgtgtggcccccactcctcagaatattgcttacagctggaataaggaactggcttatgaaaatggtgagattgtactgggcgaaagtaccctggtgctgaatctgcctattatgatcgggccgggaatgaatatccaccgccatgcttacaacagccggggagcggaatattatgcagaggaccccatcctcaccggctatataggaagtgcggtgatacagggagcacagtcaaaagggactttggtaaatatcaagcatgctgcgtttaatgaccaagagatcaaccgttccggcattgccgtgtttatgaatgaacagaaggcacgtgagcttgagcttcgcggacttcagcaggccttcgaggctgggggcaagcccgcttccttccaagacgaggaaagcaaggcggatacctataccacaggtgcccttggagttatgagttcctacaaccgtattggtgcagtggcctccagtgcaaaccggggagttcaggtgcagatcatgcgtgatgagtggggcttcaggggctacaatgtaaccgactttacaggagtgtccttaaaggcttctccaaaggaatccattttggcgggaactacagcgttctgcggctttgatatcacggacgatattacctactggagcggcgaggcattaagcggcgacagggaaatgctccaggctgtgaagcaggatcttcactatctgctctatgcgctggccaacagttctgccatgaacggaatcaattccaccacccacagtgtaaatgtactgacctggtggagaggactttacctgggctgtatcggagtttttggggcagccatcctgttgtgcgtgctattctatggtgtgggcagacgcagaaaaactgcagaaagggagaaaaaataatatgaaaagtaattctaataaatctacatatgccgtgatagttgcggcagtgggagcccttgcaggtctgatcgtttatatctatacatctgtcacaggatttctggcaccatcagggctgaaccctcttcctgtgatttgtacagcggcggcgctgcttgtgatgtttgtattggtagttcagggcagtaagctgggaggctatggcgtggaccttgccattgttctcacaggtgttcttcttctggtaagcttttatcagtttgtcctgggccgtgtggcactggcggcagatgtatattttatccctgtcaattatcctgcatcagaggctacggccttacatgtttccattgtgggacttgtgttctacctggtggggatcatcgctctcattgtgactgcattcagccacaagacgggcacagagtaaaggaacaggaagttatcgtggatggaaaaatccgcacaaagaacagcaaagcgagggatctgaaacgatgaaaggcattccgtttaatacaggatggacctgcaggcattacaatgagccggggccggggcagccagtgacactgccccatgacgccatgctgggagaaccccgcagcgagacagctccaggggggaccaatacaggctggtatgagggctttgattatatttatgagaaagagtttcttcccggtgagcaataccaggggaagaaaatgatcctggaatttgaaggcgtttaccgaaaagcagaggtgtgggtgggagagaagaaagcagccttccgcccatacggatacacgaatttctatgtggatatcacggagcttgtgaagatcggtaagaataacaagatccgtgtcattgcccgcaatgcggaccagcctaacagccggtggtattctggagcggggatctaccggccggtgactctgtgggtttcggaaaaggagcacattcttctgaacggggtccggctgcgtaccttgtctgtggagccggcccgggtggaggtcaccgtgtccaccagcggcccggggaaggtgaaaatctctctactggatcaagaggagattgtggcagaacaggaaatccaaagtgatggcacagctagtgtcattctggaggtgccccaggcaaagctctggaatgtggataccccttatctgtatacctgccaggtcagctttggcagggatgtggttcgggagcacttgggtatccgcaccctgacctggggaaacaagggaatctgcctgaataaaaaacgtgtgattttacagggagcctgtattcatcatgacaacggactgctgggagcgtgctgtgaaccagatgcggtggagcgtaaggtgaggattctaaaggagaatgggtacaacgcagtgcgaagtgcccacaatccttgctccaaggcccttctggatgcctgcgacaggcagggaatgcttgtcatggacgaatacattgaccactggtatatccataaaaccgaatatgattacgtagagtattttatggattggtggaaacaggatttgaaggatatggtggaaaaggattacaaccatcccagtgtgatcctatattcgacaggaaatgaggtcagtgaaacagcacagcccaaagggattgccctcacaaaggagatgacagagtttcttcatgaactggacaattcccgccctgtgacctgcgggatcaatatcttttttaattttttaagctccatcggttttggcgtttacagtgacaagaaggcccaaaaagaagtgcaaaaggcggaaaaagcttcaaagaacaagagcactcagaaaaaaaagaaggcggtgggcagtcaatttttcaataacctggcagggctgctgggggatgagttcatgaagcggggggcgactcttcacggctgtgatgtgaagaccagacaggcctttgcatctatggatattgcgggctacaattatgggatttaccggtatctccgggatctgaagaaatatccccggcggctgatcctgggaagcgagactttctgcaaggatgcttataaattccgggagatggccaagagacatccgcgcattgtgggagattttgtttgggcaggaatggactatctgggagaggtaatggtaggctcctgggaatataaagattatgcaaaacgctttgacgcaggctgcggctgggtgtcggctggctccggacggattgaccttacgggaaaaccgctgtgtgaggccttgtataccagagttgccctggagcaggcccagggtccctttatgggggtgtgtcccgtgaatcatacaggagacaagcacagcccctctgcctggaagatgagtaatgccattgagagctggagctggagaggctgggatgggaagaaggcagacgtggaggtctatgtgcgggcggcaagggtagaattgtatatcaatggaaagaaagcaggagaaaaggctctaaagcgggactgcattgccagattccagtgtgtgtatgaaagtggtgtgatcgaggctgtggcctacgatgaacagaactgggagatagggcgcacatctctgaaaactgccggaaaagaaacgcagcttctgctggagccagagcaggatactgtccgtgaaaaaggcctgtgctatctccgtctgcgatatacggatggagaagggatcaccaagccgcttgccaggggcagcattcaggtacaggtgatgggaggagaactgctggccctgggaaacgcctgcccatataatgaaaaaggttatcggtcccataaaacagatacttatttcggagaagccctggccattgtaagagcaggtggaggctcaaatctccaggtgcaggcctctgacggaacccataccacccaggctgtgatcccggtgataccgggggataaggagaatatatggaattagtacagagctggtggatgaatttttccggaaaacataaactcattgcccaatttgtaaaattctatgcattttccatggtggtgactgtgctgcaatatctgcttctcacctttttgccaaatctgttttatagatatacagactggtgcagcattccctgtgagcttttccatttggcagtgggcccggtggacacctatgtgtttaattatccggtgacaggagatgcaaccggaggtatgggctattttgcagcctttgccatcaccctgtttctcgcacagtgtattaattttcccatgcagcggaacattacatttcattcaaagggaaatatctattatcaaatggcatggtatgtggcagcgtttgtgctcatcaccattgcctgcagcttccttatgggattgtatgtgcctttgtgcagacagttttttccgcctgcagtgtacaatattctcattacagtcatcaacggcggcgtacagatggtgatctatttccccatttataaaattatctttccggaaggcgaggcaaagtaaataaaaacagtggcaggtgcaggacctgaggctggaaaaagcaaggagatttggcgctaattcatagtgccaaatctctttttctatttattgaaaaaaaacagccaaaaaggatataatctaatcagaacaaaagagattgattggccaatcatacctcaaaaaatcacaaaaaagtataaagaggtgtgagatcaatgaaagaaaaggttcaggtttttggaagatttttaagcggcatggtaatgccaaacattggcgcctttatcgcctggggtattataactgcactttttatggctaccggatggctgccgaatgaaaaatttgcacaattgatcagtcccatgtccaccatgctccttcccctgctcatcgcctataccggaggcagcgccgtggcagggcaaagaggcggcgtgatcggagcgattgccaccatgggggtgatcgtgggttctgacgtaccgatgtttatcggtgccatgatcgtaggacctctgtctgcctgggtgataaagaaattcgacaggctgatggagaaccgggtaaaagccggatttgaaatgctggtaaataacttttcccttgggatcatcggatccattctggctttggtggctatggtggggatcacccctttggtggcatccctgaatacggttatgagagccggcgtgggattctttgtggatcatgggcttctgcccctggcaagtgtgtttattgagccagccaaggtgctgttcctgaataatgccatcaaccatgggattttatcccccatgggcatacagcaggtggaggaagcaggaagatcgattttcttccttctggaagcaaatccggggccgggacttggaattttgcttgcttattgtattgcaggcaaaggaagcgccaaaagctccgctccgggcgcagccatcatccatttcctgggagggatccatgagatttatttcccctacattcttatgaatccattgctgcttttggcagtgatcgccgggggcgcaagcggtatttttgtattcaatttgatggatgtggggcttactgctcctgcatctccgggaagtatttttgcccttttgatgatgtgcgagcgtcacagctatccggggcttctcctgggaattgtggttgccacaggggtatccctggcggtggctctgcctcttctgaaatttatgggacgtgatgccagcctggaggaagcacagcagaaaaagaatgctatgaagcagcaggcaaagggaatggtatcccagacaacagcagggaacatagatgcttccagggcagagggaagaatccaaaagattgcgtttgcctgtgatgcaggcatgggttccagtgcaatgggggccacggttcttaagaagaagattgcggctgctggccttgagggaatccaggtgatccatacgccggtatcctctatcccggcggatgtgcagattgtggtcacccacatggagctgggagagcgggctgcccacagcaatcccaatgcagagagaattcttattacaaacttcctggccgctccggaatatgaccagctggtggagcgcttaaagataagaaaccaggaataagcacatacctggcaggatgctgccagcgggcaaaagccggaggctatggaatttatctggaatgtgaactggtcatggcggcctgactttggtataatgactacagaaaagtttcattgcaggggccggcaggaaagcttccgtgtccgctgggaaaagggtgatcatgaggggcttattatataaagtggggaaattttatacaaggctgatcataaaaaatattggcatatttatctttgtgggactgctgtccgtgttttttggagagtacggatggcttcccaacaaggatatgtatgccatttcccagcttgcctatcatctcatccttcctgtgctcatcagctatgaaggaggaaaagcgattgcaggctccaatgcaggggttctgtcttcccttgcagtggctggaatcttggcggcagatgtgaacaatggtctgtggggcgccatgttgatagggcctggggcaggattcttatggaaattggtgtatgaaaggatggccaggagtgttaaggccgggcttcagatgctttttcggaatctgtgtctggctgtgctggccgggcttttgtgctggatcggctttttctgtgtgtctcccatgctggaggttttgggaacaggactctccggctgtgtgaagtttttggccggacatgggctgattggagggctgagtattctcacggagcctgccaaggtatttttcttaaataatctgatgaatcatgggatttttatccccattggcatggagcaggttcaaagcaccggacattccttattctttcttttggaggcaaatcccgggccgggaatgggactgctgctggcacttctgtgcaggaacaaaaagcggcgcagcgagtatggggcagctgtttttgcccaggctgtgggaggtcttcacgaagtttattttccctatgtgctgtctgatttaaggcttcttcttccccttatggcaggtggaatgacaggaaatctgatgtttcaattcctggatgcaggtgtgcagggagcggtgtctccagggagtctgctcacgattttgctcatggccggcaagggaaaacttcttcctgttctggcgggaattcttgcctctgcagccgtgtcctttggggggagtctccttgttatgagatggccacagaagagaaaactaacgggagagaaagcgggtccaaaagagatggcgggcgtacaggggattttaggaaggaaaacccaggagaagaaagagggttcggtcatggataagaagcaggctgcgggatatcaaaatactgaatataaaaatattagtaaggtggcagtggtgtgtgacggcggcgtgggaaccagtgccatgggagcggcgctgctgcgcagaaaaatgtcccaggagaagatcatggatgtgaaagttgaggcctgggccgcggatcttgtgccaaaagatgtggatctgctggtgtgtcagaaggattacagcgcccgcctgcctcaaagtctgaaggacaggcagatttttctcacagacagtcttctggatgcgcaggcctatgaaattctagtgaaagagcttttgaaaaacaaaaggtgaaaagtatggaatttacacccagaaccaaacaaattttacagatccttctaaaagaaaaggacagtattcccgtgaaaaagctggcagagcaggtgggaatcagtaagcggacggtacaaagagagctgagctgtctggacagaggggtaaagccctatggccttgggtttgtgtcaaaaaccggggtgggcgtaggtattgtaggaagccaggcagataaggaacgcctgcttcgagcgatcagcggcggagatttgtatgatgtgagcaacaaggaggagcgcagaaaaaggcttattctggaaattctcagagaaaagggcctgaaaaagctcttttactacagcagccagttccaggtgagcgaggccaccatcagcacggatttggacgccattgcccagtggctggcccaatataatctgtccattcgaaagaagccaggcagcggcattgaggtggaaggggaggagtcagactaccgccgggcgatccgcgcctttattgatgaaaacattgatacaggttttattcgggaggcctatgatgcggatgagggtgctcccggctgtgagaagcttcagaaaagcaatgtggcccagattttaaacgatgatatcctgaaacgggtgatccgctgcatcatgggaatgaacaattccagggttctgaatctcacagaaaattcttatgtgggtctggtaattcatatttccattgccataaaccgcatcttgaaaaacgaaaccctcaagccgggagaggtctgggaggaacgtatccgggaggatgaggattatgcccttgcctcgcagattgtacaagaactggaggaggagtttgagattggaattcccaaggtggaagtctcctatatctggcttcatatcaagggcgcgaagcatgaaaaaattccctgggaaaagggcaagaccattgagatgggcaaccgggaactgcagcttctcataaatgagatgattgatgcctttgacgaagaaaaagcttattatttaaagcaggacgatgaatttatccagggtcttttggctcatctgcagcccacattgatccggctgtcctatggaatgaaaatccaaaatccagtcctggaggatatcaagagaagctatccggatatctatgagaaatccaagaaggtttcccaggtgctggaagagaagattcacaaaacagtgccccaggaggagacgggctttctggccgttcatttcggtgctgccctggtgagactggagggcagaaatgaagagatccgtcaggttcatgcaggggtggtatgctccagcggcgtggggatttccagattgatgtctacgaagctgaggaaaattttccgggagcggatgtggatcaccacctatggaaagaatgatatcaccccctatgtgataggcaaaacagacttttttatttctagtcttcctctggagctgaaggaaattcctgtggtttctgtgaatccgctgctcagtgaggaggatattgagcagatccgccgaatggtataccagtatgagagaatgccccaaaagcatgaatcagaaaatgaatttactcatcagttggatgagattaatcagatggctgcacagatcaatgcagtgataaagtatatggagttttttaaggtggataactggatcacactgccggagctgctcattgccattggtgagaaaatgagtccctactcagatagaagtgagatgatacaggaagacattatgcatagagagaaaattggaacccaggtgtttgcagaatttggctttgccctttttcacaccaggacaaagggagtcatccgccccagcttttctgtgtgtatgacaagggatctcacggcttttaaagacccttattttaaagagatcaatgtggtctttgtgatgctgatgccagaggatgacaatgtgcggatgaacagtgaaatattgggatatatcagtaccctgctgattgaagaatatgcgtttatggaggtggtgctcaagggaaataaggaagagatcagaaagagtctgtcctcctatctgaaaaagttttttacaaaatatctgtctggattgtagacagagtcataaagctctggagcggtaagatgtcaccgctccagagctttttttgtgcaatatgtattatgaaaaaaacaggaataaaaataggcagaaactgcaaataaatataagagaacataaatggaaaaatataaacattcaccatgggaaataaaggaaaagtaacacatttttccatggatattatctaaaattggcactaactgatggcgccaaatcccatcttctttaagttgaaaatacgctgttttactggctataataaagtcagagaaagggagaataacaagaacagaaataattaaaaatcaacataatagcttccattcgtctatgaacggaaagattgttgtaaagaattattctagtagtagagaaaatagtttcacaaaaaaggaggaaaattaaatgctgttcaagtcaaagaaaaaggaaaaagaaccagagaaaaaagagcttttataccgtgaaaatattcgggtaaactgccagccggacacccaggagaacgtgatccgaaaggtgggacagatgctggtggactccggatatgtagacgccccttatgtggatgccatggtggagcgtgaggcttccctctccacgtatatgggtaacggattggcacttccccatggagttgagtcggcaaaaaaagaaattaaggcctccggtattgcggtgatggtttttccggaaggaacttcctgggggacagaaaaagccaaaattgtcattggtattgcaggggtgggagaagagcatctggcaattctgtctgtgatcgcagataagatgatggatgagcaggcagccgctcagcttacagggggaacggccgatgcagatacgctgtacagaattcttacaggaagggagtaagaggtatgatcgtaaccgtgaccatgaatcctgccattgataaaacagtggaagtacaagagctgaatccaggcggcctgaatcggatccggaaggtggaatacgatgcgggaggaaaagggatcaatgtatccaaaaccattcaggagctgggaggagagagcattgccactgggtttttgggaggaaatacaggacgcaccattgaaaacgtcctaaaggaaaaaggaatttcctgtgattttatatgggttcagggtgaaacaagaaccaataccaaggtatttgaacataccggggaggtgacagaattaaatgaaccaggaccggaaattaccagggagcagatggaagcacttttcgaaaaattgaaggactatgcaggcagggataccctgtttatcctggctggaagcattccgaacaaagtagaaaccagtgtatatgaacaaatgatccgttttcttcacgaaaagggggcaaaggtgctcctggatgccgatggggaaattttccggcaggcattggaggcaggcccggacattatcaagcccaaccggacagagctggaggaatacatgggaattgattaccgggcctcggacaaagagcttcgttggacagccagagcccttatgaaaaaaggcatagacacggttgctgtatccatgggaagaagcggagctatgctgatccgcagtgactatgaggccagatgtccggccctgtctgtgaaggcgcattccacagtgggtgcgggggatgccatggtggcggccctggcctattcctgggagaagaaggcagggaatgaagagactgtgcggctgtgcatggcagcctccgcaggggcagtgactacggtgggaacgaagcctccctccagagccctgatagatgagttaatgaagcaagtgatcatagaaaagataggagagtaaacatcatgaaaacaaaagcagtgagaatgtatggaaccaaagatctaagattggaagaatttgaattgccggccatcaaggaggatgaaatcctggtaaaggtcatcagtgacagtatctgtatgtccacctataagctggctgagcaggggaaaaagcataaacgtgccccacagaatattgacaccaaccctattatcatcggccatgaatttgcaggtgtgatcgtggaggtgggagaaaaatggaaggatcagtttcagcccggaatgcggtttgctcagcagccggccctgaattataaaggaagcctggcatctcctggctactcctacgaatttttcggaggagcctgcacctactgcatcatacctcacgaggtgatggagctgggagctctgatggagtacaaaggagacagctttttcgaagcttctctgggagagcccatgagttgtatcatcggcggttacagaggcaactatcacaccaacaagcgggatcacagtcatgccataggtaccaaagaggatggcgatattattattttgggaggctgcggacctatggggctgggagctgtgagctatggtatacagtttgaaaataagccaaaacgcattgttgtcacagacattgacaatgccaagatcagcagagcgaaagaagtgatccctgagtccatggctgcagaaaaaggtgtggagctcatctatgtgaacacggcagaaatggcagatccagtacaggaattaagggacattacagggggaaaaggttacgacgacgtgtttgtatatattcccaaccgggctgttgctgagatgggagataagcttctggcctttgacggctgcctgaacttttttgccggccctacagacagccagtttcaggcagagatcaatctttataactgccactacaccagcacccatgtgatgggaaccacgggaggcaacaatgatgacttgatcgaagcccttgagctctctgcaaaaggggccattgaacctacggtcatggtcactcatgtaggcggcattgacagcattgcaaaggccaccctggagctcccccaaattccgggaggtaagaagcttacctatacccagtttgaaatgcctcttaccgccattgaggattttggaaaattgggacagacggatccactgtttcataaactggatgaagtctgcagaaaaaacagaggtttatggtgcaaggaagcagaacagattttgtttgagcatttcggcgtagaagcataggaggaagtcatatggtatcagaaagggttacaattataaatgaatccggactgcacgcaaggcctgcatctattctggcacagacggcaggtaagtgcagatccgatgtgaagctgatcgccaacgggaggaccattgaggcaaagagtatattgaatatcatggcagctgccataaaaaaagggacggaggtggagatccgatgcaccggtgacacggaggcggaggatttacaaaagcttaaggagctgattgcaggcggattaggagaatagggatatggagaaactatttgtggaaaaaagggcgtccagaggcattgcctgcgctcctatatacaaatacctggaacctgatctcacccctgcagactataaggtggaggaagataaaatccaggaagaaaaggaaaaattctccagagccagagaggctgtaagggcagaattagaagctctttcccccaaaaatgaaatctttgcagctcatctggaaatcgtccaggattttacacttgagaacatggtagatgagaagctgaaagagggcgggatcaatgtccagcaggcagcagcacagacagtggaagagctggcagcagtttttgatgccatggacgatgcctacatgaaggaacgggcggcggatatccgggatgtgggaaagcgtcttctgtgtgctctgaaagggattcccatgaaggatctgggacagatgaaggaagcctgtatcctagtggcaagagacctgtatccttctgatacggtgaaaatgaatccggaatttgtgaaaggaatcatcacccaggaagggggcattacaagtcatgtgtccattctggcgaagagtatgggaattcccacactggtgggggtgaaggagatcctgcttaaggcacaagagggggattgggcctgcctggatgccggccagggagaaatcgttctctgcccagaggaagcggtccttcaggaatatgaagagaagaaagaacagtaccagaaagaacgggagattttgaaaaatctcagacagcagcccccagtcaccaggacaggaaagcgcatttctctgtgtgtaaatgtgggcagactggaggagttaaggcaggctttggatatgaatattgatggagtggggctgttccgcagtgaatttctgtatatggaaaacacccattttcccacagaggaagagcagtttgcagtctataaagaggcagcacttctcagtcctttggaattaacgattcgcacgctggacattggaggggacaaggaactttcttatttccggtttgataaagaggacaatccctttctgggttacagagctatccgtatctccctggacaaaaaggagatgttcaaagaacagatcagagccattctccgggcaggagcctatggccatgtgcgtttgatgtttcccatgatcatttcccttgaagagcttacggaagcgaaaaagctggtggaagaatgtaaggaagagctgcgccgggaaggacgctcctttgatgaaactatggagacgggaatgatgatcgagacaccggcaagtgtgctgctggccagagattttgccagagaggcagattttttcagtattggtaccaatgatctgacccagtatatcctggctgtggacagagggaacaagaagatcgcagaccggtatgattatttccacccggctgtggtggaagccatccgcaaggtgatccaggcaggccacgcagaggggattaaggtgggtatgtgcggggaaatggccggagatcccaatgcagtgcccaaactattgcagatgggccttgatgaatttagtatgtcagcaggaagcatggacgatgtgagaaagatgattttagaatatggggaatgatcaggcgtgaacaatccgcttgaaatcctgaagcaagatccctgtctgaatcctacacctatttatggtatgggatcaggcagggatttttgagcacctctttgagattgtacggcatattgccactgtggaggaagggctggaataagcaggttttgtgttcaatgccaaggactggctgcagatgggaaaagaacccatgaaatgcattttacccgttgacgtgagtttctgtgaatgataggcttatagaaagaaacgtataggtttttagtatgggaggcagcagaccttttgggatactgtcagtgaaccaggaatagatggagggtcagaggaatggataaggaaaaattaaggtatctggagcagctttctgaggcttatcccaccattgggagggcgtctacggagatcattaatctccagtcaattttaaatctgcctaagggcacagagcactttttatcagatattcatggagaatatgaggctttttcccatgttctcagaaacggttcgggagctgtgcgcagaaagattgacgatgtgttcggccatacgctgggcacagcggagaagtgtgctctggctaccttgatctactatccgaaagagaaaatagagattgtgagaagcacagagaaggatttggaaaactggtacaaggtctctatttaccgtctgatagaggtgtgcaagcgggtggcctccaaatatacccgttctaaagtgcgcaaggcccttcccgcagattatgcctatgtgattgaagaactgatcacagagaaatctgaggtgctggacaaggaggcttattatgagtccattgtgaacacagtcctggaaatcggaagggctgaagaacttatagaggcaatggcagagctgatccagcgcctggtcatcgatcatctccacgttctgggggatatttatgaccgtggccccgccccgcattttatcatggaccggctgtgtgaatatcattctctggatatccagtggggaaatcacgacgttctgtggatgggtgcagccatcggccagccagcctgtattgccaccattataagaaacagtctgcggtacggaaatctggatattctggaggatggttatgggattaatatgctgcctctggccacttttgccatggaggtctatggaacggattcctgtgactgttttaaaatcaaaggagccagcggggctcatgatacagagactttgctggccatgaaaatgcacaaggccatcacagtgatccagtttaagctggagggacagattattgccagaaggccggagttttccatggacgaccgaagactgctgcacaagatcaacttcgaggaccatacagtggagattaagggaaagaaatatccaatgaaggaaacctcgttccccaccgtggccccccaggatccctatgcactgacccagcaggaggaagaggtgatgcgccgtctccagtctgccttcaagcggtgtgaaaagttaaagaagcacacgagttttctgctgaaaaagggaagtctgtacaaggtatttaacggaaatcttctctaccatgggtgtgtgcctatggaggaggatggcagcttccgcaaggtgtctgtgtttgaggagacctgccagggaaaagcgctgtatgacactctggaagcctatgtgagaaaggcttttttctccctggatgcccaggagcaggagaaaggggcggatatcctgtggtatttgtggaacggtccggattctcccttatatgcaagagataaaatggccacctttgaacggtattttctggaggatgagcagacacacaaggaagagaaaaatgcttattataaactcatcgagaagcccgaaacagcagaaaagatcctgaaggaatttggtcttagtggaaagatggtgcacataatcaacggccatgttccggtgcatcaaagcgagggagagagccccacaaaatgcggcggaagagtgatcgtcattgacgggggattctgccgtgcttaccagaaagtaaccggcattgcaggatatacccttatctacaactcctacgggctcatcctcacagcccatgaaccctttgagtcagcggaggctgctgtttccaaggaacaggatattgtgtcccgccaggtggatgtacaatataccagcaagcggatgcttgtgggagatacagataatggaaagaaaattaagttaaggatccaggaattaaaagagcttatccgtgcctaccgggtgggcgagatcgtggaaaaggataaataggagcaggcatcaaagcaaatgggaatttcctatgttcttggccgcctgacagggatgcctgaaaaataaagaaaaaagtagttgacaaataatactgtaaccaatataattacagtataaactgtaacagaaaaaattacagaaaataaacggaggcagtcctatgaaaaaattatcttacgatgcaattattatcggattcggaaaaggtggaaaaacattggcagggaaattagccaaggcaggcaagaaggtggctttgatcgagagagatgcagatatgtacggaggcacctgtattaatgtaggctgtattccgtcaaaatctttgatccacagtgcagcggcagcggatccgctggcggatgacggtacgaaatcagacaaatatgcacaggccattgaagagaagcgcagacttacttccatgctgagaaagaaaaactatgacaagctggcaagtctgccggaagtgactatttacgacggaactgcccgcttcagtggaccactccaggtggaggttttcactaaggatgaagtgctcacactggaaggcggacagattttcatcaatacaggggccacccccagaattcctgccattgaagggatccgggatacccagggagtatataccagcgcacaactgatggatttaaaggaatttccaaaggaattggtgattataggaggcggctacattggtctggagtttgcttccatgtacaccggttttggcagcaaggtgactgttcttcaggatggagagaccttccttcctaaagaagatgcagacattgcagaagaaattaagaaaatcctggtggagagaggtgtcaccttcctgttgggagccaagattaagaaagttgcctccggaccagtggtgaccgttgattaccaggggcaggaaatgcagctgaaagcagaggctgtgctggtggctacaggcaggatccccaacacagaagggctgaactgccaggcggcgggagttgagcttacctccagaggcgccgtgaaggtagatgaaaagcttcggacaaccgcagagaatatttgggcaatgggggatgtggcaggcggtcttcagcatacgtacatatccttggatgactccaggatcgtatggtctcagctggcaggagggagatcctataccacagcccacaggaaaaatgtgccctacagtgtttttcttgccacaccttattcccgtgtgggccttaatgagagagaagcccttcaggccggcttcaagatcaaggttgccaagctccccgcaggggcggttcccaaggcacaggtgctcaaggcaacggcaggacttttaaaagcagtcattgatgaagagacaggtaagatcttaggtgttatgctgctgtgtgaagaatcctatgagactatcaatgtggtaaagacagccatggatctgggggctgactatacagtgctcagagaccagatatttacccatccaaccatgacagaggcactcaatgacctttttaccctatagatggcggaaaaacaggaggtatttatgaaaaagggaaaaacaatttttgcaggaatcctgggtggagtttttatgttgaccgcagcctgcgcggctccgggaactcagcagaaaaacacggaaccccaggaaactccggcagcccagagcacccaacagacggaagacgcttatcataaaattacgcctgaagaagctaagaaaatgatggaggaagaggaagtgaccctggtagatgtgcgtacacaggaggaatataccgataaacatattcccaatgccattctcattcccaacgagaccatcaaggaggaaccgccaaaagagctggaaagtaaggatgctaaaattttagtctactgccgcacaggagtgcggagcaagcaggcttctgagaagctggtagatatgggataccagcagatctatgacatgggggggattgtggactggccatatgacacagaaagcggaaactctcaataacagaaacatatctggaagcccctgcagattctggcaagatgtctgcaagggcttctttggttgtaagaaagccatccgggcaggatatacaatttcggcaggagaaaaaaataaaacttgacttggagtgcactccaggtgttatgcttggaacaagaatcatgacaggaggatataagaatgatttataaagattttcaggatataaagctgtctgcattaggatttggagccatgcggcttcctgtggcaggctgtgatcttgacgctcccattgaccaggaggcagccgcccagatggtagcctatgggatagaacatggcgtcaattactttgataccgcatacggatatcatgaaggacaatcggagatcgttatggggaaaatcctgaaaaattatccccgtgacagttattatctggctaccaaatttcctggctatgacttgtccaatatggataaggtggaggcgatctttgaggaacagctggaaaaatgtggggttgaatattttgatttttatctgctccataacatctatgagaaaaatattgactcctatatggatgaaaaatatgggatcatgcgctatctgttgaagcagaaggagacagggcgcattaagcatctgggcttttccgcacatggccgctatgataccataaaacggtttttggacgtgtacgcagagcatatggagttctgccagattcagttaaactatttggactggaagcttcaggatgccaaagagaaggtggagcttttaaatgaatataacattcccatatgggtgatggagcctcttcggggaggaaaactggcagaattaagtccggaaaatgaagaaaaactgaaggagctacgtcctttggagaatgttcctgcctgggcctttcgtttccttcaaggggttcctggagtgaccatgatcctgtccggtatgtcaaacatgaagcagattcaggagaatattgccaccttcacccaagaaaagcctttaaatgacaaagaaaaaaaggttctggaggaaatcagggacagcatgctggatattcttccctgcacagcctgccgttactgtgtcacccactgccctcaggagctggatattccaaccttgctgtctctatacaatgagacaaggtttaccaatggtctgatcacacatatggcagtggaagcattacctgcgcagaagcgtccggattcctgcatcggctgcaaaagctgtgaggcagtctgtccccagcagttggagatcgcttcagcaatggctgattttgtagaaagactgaagcagcctgcagggctgtaataagaatgaagcgggcaagcccgtttcaactctcctgtaataaaaaaggacccctggccgcaggtaaaatacctgtcagcccaggggctttttaacgtgcatatttaagcggcacaaacgtttactgccttgaattttctgctgtctttcgggtctgcctcgatatcaaaagtcaccttctgtccgtcttccaggctcttgaaaccattgcctacgattgcggaaaaatgtacgaagatatcttcgcctccgttgtcatttgtaataaaaccataacccttctgagagttaaaccatttcactgtaccggtgttcataatcagtacctccattttaattttcgtatcaatgacaataaaaaactgacctgtaattgtaaatcggaaaaaatggacttacaactataggtcaggttcaaattcttatcgatcacatacacatcatagcatagggaaatgaaaaagtaaaggaatattttattttttatctcccggtttcagggccccttttccacagacttgaacagcggcaaaaagcttctccgggtccactggcttggagatgaaatcgttcatgcctgcttttatagatgccgccacatcctcctggaaggaattggcggtcattgccaggatggggatcgaccctgcgtccggatgggtgctggaacgaatctctgccgttgcctccaagccgttttttataggcatctgaatgtccatgaggatgagctggtaataccccggagtactctggacaaaacgctccacggcttcctgaccattttgggcaacctccaccaaagcgccgtgaagggagagaagctgcacggcgatttccgcattcagttcattgtcttccgccaggagaatgcgaagactgctgaagtcatagcctccatctgcagatacagaatattccttgaagatatcaggcttttcaaaagaaagttccagagggatggtaaagtaaaattccgtgccctggcccactgtactttctacagacagttccccgcccatcatttccacaatactcctgcagatgggaagtcccagtccggttccggagcttttggatttggaattgccttcctgttcaaagggatcaaagatacgctctatggcctcaggggaaatgccaacaccgctgtctttgatggaaaaatgtaaacgggaggatacctggtccctgaaaacctcttgaatttccaggctgatccaaccaccggagggcgtaaactttatagcattggataaaaggtttaccaatacttgttttaaacggatgggatcacctttaaagcagcagtccttggaaggatagtggaaagaacaatgcagctccttatgagaagccagggaggctaccatactttccacctcatccagtacttgctttatggaaaagctttcatgggttagcaccatttttccgctttcaatccgggacatatccagaatatcattgatgatggacaaaagataccgggaggaagactgaatcttatccaggtattcctttaattcggaagatgcgtccttagacaggctggccagtcccgaaagacccataatggcattcatgggagttcttatctcgtgagacatttttgataaaaattcgcttttggcccggctggctgcctcagccttctccagttctgcggcgatggtggcattttttattttggatttggcaaaaaatatgatcaccatcacaataataagaaggaccaggcagataaagcccacagtctgtgttgggttggaatagatcagctgtgccagagtcactggatagttggcaatggaaaccatattgttggaaaccagagcactttgttcctcagcagacagattggtgatacatttatttaaaattgtcagcagaggtgcaggggcagggcgggccactgcaaaggaaatagggttttgggcatcatttacggttagcagggagatgtggtggtaataatgctcctggagttcccggtccatactggaggaaagtccatacataaaatcacagatacctttgtccacagatgttacagcctcctggacagaggggaaggaaatgatttgagcagcgtttatatttcctggaagggaagtgccttccagaactgctgccttcagaccggttcctggataggaggcggttttattttttacgattatattattcagggaggtatatgggccagtaagagccagtccttgttccagggctgttttttcagtcgataagtaaaaaccaaggaagtccgcttctccctccttgaccagatcgatggctttttcataagtatctgtaggaacatacgcaaagttaagtccgctgctcatgtgaacagcattaagaagtccagtaagaattccggaattgccatgcttttcttcagaacagtagaaaggatgcatctctgagactacggccacccggaaggttcctttgtcctttatatagtcagtttcttcttgagaaaattttagctgaatgcctttcaactggccaaaattgttttcgtggacctcactgctgaaattcggtctggaattattgatctgcctgagtgcattgttcaatccatccagaatttctttattctttttagtagtgaccaggtaataaggctgggcctgaaattctgcgattacccggaaggtgccgtctgcctccatatcattcccaagaagaaggtccacctcttttgtttccagtttcgaatagagatttccatcgatcagatcttctgcctgatagtatacaagcttacaggtcacaccattaaaatccagaaatttcttcagacgttcaatcttatccgtggcatttgcatatacaccgatggttttaccattaatggaattaatatcataactgctcatttcagcgtcatccagacgggcgaaaagaacaccataattatagcccgtgttatattccgggtaagcgtaccattcttcatagctgggagaatagtacatgccgcccatgaggtctacgctgccgtccgccacctgtgtaataagatcttccgcatcaccggagacatattcatattcccagttggtgtatttggagatctctgtgagatagtctaccaccattcccttgtgagttccatcttcgtccacttcactgaagcctggaagctggggaaaagccacttttagaacaacaggctctgcctcgattgatgaatcggcgttggaggcaaaaatcggaagtccacactgcacactaaggaaaatggccgacacaacaacgattttttttagatttttaggccctataaatctcataacatactcctttaagctgtaaacttgctatatcttacttattatactattaaaacatggggataacaagcttgcattgaacggtttaacagatttgtgagaaatgatagtttctgttttgactgtatgtctgtaattgccatcccatcgtccctgcgtttataaaagggatggagctgtacagtgaggagagcaaaaaaggaataaaactgtacttgacagataagtacagttatggtagactgtacttacttgataagtacagcaagtacagatgcggggtggtaatcatggaaattatattaagtaacagcagtgagaaaccaatttatgaacagatcgtcagccagattaaaagtcagatcatgagcggacagctaaaatccggagaaatactcccctctatgagagggctggccaaaagcctgcatatcagtgttattaccgcacagcatgcctatgaagaactgcagaaagacggttttattgagactgtggcaggaaaggggacctttgtatccgctcaaaaccgggattttatcagagaggaacagctgcgcatggcggaggaaaagcttgcacaggcagctgagatcggcaggaccaatgatattgaattgtcccatttggtgaaggtgctgactatgttttatgaggaaggggaatagagatgagtgaagaaaatgtaattctaaaagtagataatcttgtgaagaagtacaaggatttctgtctggatcatgtgagttttcaggtaccaaggggcgttgtttttggagttatcggagagaacggcgccggtaaaagcaccaccatatcagccattatggatatgatcaagatcaatgatgggaccatagctgtctttgggaaggatcacaaaaaatgtgccagtgaggttaagcagaaaatcggcgtagtcattgatgggctgaaccagatacctttcctgtattgcaaggatctggataaaataatgaagcgggtttaccggggctgggacagcggacagtactttgaatatctggagaaatttcagcttccccaggataagaaaatcaaggatctatccaagggtatgaatgtgaagctgaactttgcagtggccttatcccaccacccagagcttttaataatggatgaagccaccagcggtctggacccggttatgcgggatgatattctggaaattctccgggagtttgttatgaatgaaaaccattccatatttatgtctacacatatcacaagtgatctggacaagatcgcagattatgtgctttttattcaccagggcagaatcctttttgtaaaatctaaggaagagctggacaatgaatacggcattataaactgtggcaaagagctgttccagtccttgtcacctgaggattacgaggcttatattaaggatgaattttcctaccgtgtgcttgtaaaccacaagcaggatatcctggaacatatccgggatgtggccattgaaaaggcatctgtagaggagatcatgcttttctatgtaaagggggtaatggcatgacaggtttgatttatagagatcttctggtaaattatcggaggacttctaaagtgaacaggatcatggaactgttgtttttaataatcttcctttttgtgattaaaggaaaggcatctttgctcacatttgtgctgctggtcatgccagtgaacatgtgtggaatggctgctaccatgaaggaaattgacagcacctataagggaatgatgcataccatgacaatgccattcactcataaacagattgttctttccagatttctgtctgtttatctgcagcagttaaaatatgtggcagtgatgctggtgtacactatcgcccattactttttatatagaagctattcttttaccacctatttacagatgtttgcggcgggatggatcataggaattatatttgcggcagtaaatttatttacgagttttacaggtagtctgaatgtaacggccatggtatatatgggcgtgatcgtagtcatgtttcttgtgtattttcttgttatgctgctggatctagatgtgaaagtccttctctatttagatcctgtggcgggatggctgatctttttggcagcaggggtaatcgcggttgccgcctccttctttggctcattggcaatctttgagaaaaagcttccttgatggcagggataggaaaatttcattgaaccaaagattgatcactaaattttgacctttgttctgggaagaaatggtgagcaagatgggtggtagtaggatcaaatatactatgaaaaaaatgcacaaaatagcaggttaatgtatgatggaaaatgacgaaattcattgaaagacgaaaatttttattacaagacgagttctgaaaatgttaaaataacagaaaataaaagggaggtctacaaccatgaaacgtataaaagcagcctgcctggagcagacgatccattttctgttgaaggaagaacttggcccaaaggcagcccaaaaagctgtaaatgacgaatatgaatactataaaaaacagctggaggcgaagaggacaaaatacaaaattttggaggaaaatgtccagccagacgggtcaatcatcattaaaataaaaaaacaatataataaccatgactgtggagattatatggagtgatcctacaatctttacagaacaaaaagctatccaggccgttgttatgaagcagcggccttggtttattgcataggaaagctgcttcacagctgaagcggccttgtccactttgttatttacacagagaacaggcacacatttgaggataaaagaatgcttgatgaaaaacagcgaaatcgtttgatcatgtatgcggacagccataatcaggtgatcgagattcaggatcttgaagaaatctgcggcaggaagactatcagcgctgcccagagggtggaaattgagcgttttctatctgccagagagattgctttaatggatttgagtcaggaagagtctgccttggaggatcaggaggaatacctgtgtcaggaagaaggcgggggagaagaggacaccgattcccgggaaatactttcacagaacgatgtggagttgatgggggatgactccattaaaatgtatttgaaggaaatcagccaggtgcctctgctgacaccggaacaggagactgccattgccagacggatggaacagggtgatacacgggcaaaggaggaattgatcaatgcaaatctcaggctggtggtcagtgtggcaaagcgatacacaggcggaagcgggatgccttttttagacttgatccaggaagggaatataggcctgatgaaggcagcggaacggtttgattaccaccgaggatacaagtttagtacttatgctatgtggtggatccgccagtcaataacaagagctattgcagaccaatccaagaccatccgtatccccgtacatttaagagataccatgaataaaatcaggataaaatccagaagatttgctgctgaacaggggagagaacccacagtgagcgagattgcagctttcatggaaatgccagaagaaaaaattaaggaaatcatgaataatttcagagatacaatttccctggataagccggtgggtgaccaggaggatgcgtatttattagattttatttctgatgataacgtgccggaacaatttcaagtcatggaatacaaaatgctccgccaagaattggaagagaatctttcctccctgacagagaaggaaaaaaatatcttgaagctgcgctttggctttgtggatggacgaatctggactctggaggaagtaggaaagatctaccatgtgaccagggaacggatacgccagattgaaagaagagctatccgcagactacagtttcgcaaggacattcgaaagctgcgggtatatattgaataataatatgtggttttccacaaggtatccataggagatcttgatttctgtaagaacgtttaagtaagcccgattaaaaatcagggctttcttttttggcagaatagcagattcatacagatcgggtgtcatgttttttacggttttacaaaaggcagccacattgccggctgcattgtgtatgttaataaaaccacagccggtattggcagatatttctgtttatctttccatgaagggacaaaactgttatactattgatactaccttttggaggacgacttatgagtggaaagaaaaaaatgtccgggaaaaaaataggagggatcctgctgagacttctggcagggggctgcatcggtttcctggggggatacggcataggtatggtgttgagcaggtatggaagaaaggtgggacttttgaccgtgtgctttctgcttgtgtgggtagcagcagctgtgcttttggagcttattgtccacgaggcagggcatctcgtgggagggttacttactggctatgaattctcatcttttcgaattgggagtatcatcatactaaaagaacagggaaagcttcgggtaaaacgcatgaagctggccggaactcttggccagtgtctgatggtgccgccccagaaggaaaagcttccggtggtaatctacaatttgggcggcatctttatgaactttcttaccgccttgctgggagcagcggtctgtgcggcatccgggaattttactctggctgccatgagctgtattctggcagtgatcggggtttttatgggagtgaccaatggttttcctttaaagacagggttatataatgacggctataatacccgccttttaattgggaataacagagcccgggaagccttccgcaaacagcttcttatgattgaacagatttccaaaggcgtgcggttaaaggatatgcctaaggagtggttttccttacaggagcagggcaccgaggatggcattacccgtaccattgacgcatttcggtgtgaaaggctcatagaccagggaaactatgaggaagcattgcaggaaatcctaaagctgcgggggaataaagagatgcttcagattcatcagaggcttcttaggggagaaggacttttctgcgagctggttggagaaaaccgcagggaagaagtggaaaaactatatgactcagaactgaaagcttacataaaggcaatgaaatcaaatatttcgacccagaggatattgtacacctacgctcttctgggagaaaagaacagaacaaaggcccaagaatacaaaaaagcctttgaaaaagcggcaaagacgcatccctatgcctgcgaggtggaggcagagcgggagctgatggctgtggcaaagaggagaagctgataaatggaaaaagaactgctggatgtggtagatgaacagggaaagcctacaggccttgtgaaggagagggcgcagattcataaggacggggatctgcacaggactgcccatgtatggattttcaggagagatccagataacggacatattcagcttctgctgcaaaagcgtagtgcctggaaggattcttaccccggctgttatgatatttcttcggcgggacatattcctgcaggagcggattacctgccctcggcgctaagagaattagaggaagagctgggaataaaggctcaggcggaggagctgcagccgctgttttaccacctgggctattgggaggatgtattttacggcatcccatttaaaaatagagagctcagtttggtatacctctacacagggaatgtggaaattcaggaacttaagcttcagacagaagaggtggagctggttcagtggatggatctggacgaaattcttgccaaggtgagaaaaagagatccggcattttgcacagaagaggatgaactggaggctttgaaggaaatactactggataagcctcacgggaaaaaaatgagaagccccatgaacggaatccgggaaattcccctgagcactggggcgaatgacaatccatagaaaaagacaaatttgttcagagagaaggaagataaggtgacaatccgaaaaatatcgaaaatgctttttgtgatcaacggcctgcagtttctgctgggggcgggaatcctcattgggattcaaagcaggcttctgcggcagtcagagtggatcattgatctggccatgatcctggtgctgctcagcagccttttgaccattgtcggactttattctgccaccaagtaccagaatcttagttatgaagagagtatgaaaaatctggaaaatttgaaccggaagctgagagaacagagacatgaatatttgaaccagatccagattgtgtacggacttctccagctggaggaatatcaggaagcccgcagctatcttcagccggtttttaaagatatcatgaagatcaacaaggcacttaaaactgcacagcctgcagtgaacgccctgcttcaggccaagatcgagacggcggaaaaacaggggatcgacttttatctggaaatctctactcaactgaaggatcttgccattgagccctgggagctgtgcaagatcttggcgaatttaattgataatgcagtcaccgcagtggctcaaaattctcaggagaaaaccgtgcaggtggaaatccgggagacgaaggaccggtatgcctttgccgtgcggaacaatggaccccagatccctgcccaaatgcagagtctgatctttgtccagggttttactaccaaaaaggaggagggacatggaatggggcttgccattgtgtcctctatattaaaggagtccgggggagagctgtccatgaccacagttcccggggaaaccgtattctccttcacccttcccaagaaggagagaaaaacctctgtaatttcaagagggaaaaatgacaggatagtacgaaaagtgtataagtagtggctttcctctggtattttttcagaaaccaggtaggataaagaaaaaaaggaaggaggagagccaatggacagctttatgatcgcaggaattatccttctcattgcaggatttgtattgattggcatagaaatggtcatccctggtttttccgttccggggatcagcggcatcatctgtctgctcctgggagtttttctcacggcagatacatttctggagggcgtgttcatcaccgtggtggtgctggccctgttgggaattatgatggcaattattctatggctgttgtcaaaagggaaagttcattctcccattatcctggaggaggaacagaagaagacacaaggctacataagctccagcgacttgaattatctgctggggaaaaaaggaaccgcggtaacagatctgcgtcccactggaatcggaaaattccatgatattaatctggatgtgatttccgaaggaaactatatatcaaaaggccaggagctggaaatcataaaagtagagggttccaagctggtggttaaggaaattagtgaaagaaagagggaagaatgatggaaattatgcaaaatatttggtggattgttttactaggcgtcattggcctgctgatcgtcctattttttgtatttgtacctgtaggactgtggatctcatccctggcagccaatgttaagatcagtattttcaacatgatcggtatgcgtttaagaagggttatcccctccaggatcgttctgcctttgatcaaagccagaaaggccggactggatctgggtgtgaaccagctggaagcccactacctggcaggaggaaatgtggacaatgtggtaaatgccctgatcgcctccgagagagcaggcattgagctgaagtttgaaaaggccgcagccattgacctggcaggacgtgacgtgcttgaggcagtaaagatgagcgttaacccaaaagttattgagacaaccaatgtatctgctgtagccaaggatggaattgaacttttagtaaaggccagagtcacggtacgcgcagatctggaacggctggtaggcggtgccggagaggccactgtacttgccaggatcggtgaaggtattgtaactaccgtaggttcagcgggttcccacaaggaagtgctggaaaatcccgatgacatttcaaagagagtgctgagcaagggactggattctggcacggcctttgaaatcttatccattgatatcgcagatattgatgtaggcagaaatattggtgcacagcttcagactcttcaggctgaggcggataagaacattgcccaggccaaggctgaggaaagaagggccatggctgtggcaagagaacaggaaatgagagcttatgtggtggaagccgaggcagaagtgccaaaggcaatggcatatgctttaaaggaaggaaagcttggtgttatggattactatgagcttcagaatttaaaggcggatacttccatgagagaaaatatcggagcgaacggccaggagtccgtgaagctgtagaaggctgtaacggcagcggggagggatggttttgaaaattgatttgctgggcatggtaaattccatgaataaattcaataacaatgggatgcagaatttccttcctacaaagaagtccggatggagcaagggtattcattccattcctaaaaagtggctccagattgaagaagacctggaggagacggaagaaagcctggaggagacggaagaaagttatttccaggaagacgcagaagaggagaaacaggaagagaagcctgctgcatcctgtgtggcagtgcccaagggccgggaaaaggcagttttgcccgctaaggctggaaacagcatgtatctgtccggagaagagaatctgcaaaaggcagtggtgtgggccgaaattttgggagagcctgtatccaagaggcgaagaaggaaaagatgggagcagcactatggcgatcaaggttatgctggtagaagatgaggcaggtgtacgtctgcttttgaaaaaaatcatagagaggcataaggaattccaggtagttggagaatgcgacgagctgggggaggcagtgattcagtttcgaaagctccggccagaggcagttttcctggacattggcattaaaggacagaacggagtggaatgcgcaaggatactcacagatctggacccaaaggtgaaaattatctttgccaccgctcatgcagaatatatgccggaagcctttgagctctatgcttttgactacctggtgaagccctttgatgtggagcgggtggataaaacgctggaccgcatggctgcgctggaagcctcggaaggctatgagcaggaggaaaaagtcctgaagccggagaaaaagctgggaaagcttctggtgaagggaaaagagagcatgagctttgtggatataccggagattattcttatacagcgggaaaatcatgcaactgtaatttacacagagaaggatatcttcattacctctgccagcatggcagagctggagcaaaagctggatggagaacaatttcttagaagccacaaatcttatatcatcaatttatccaagatccggaaaattgagccctatggaagatggacctatgtggtccacttccagggaagaaaagaagatgctctgctcacggcagagaaatatgaagaagtgaaaaaacgatttctttagaaaagctaagaatctcagcagcatgtgcagacttcgcaaaagaagcgcacatgctgcttttctgttatataggtgattccgtccagacgggatccctgctttgcagttggatattggtccccaacattgatttcctaaatttaacatttcacaaaagaaacacaaaaagaacaattttttttcatagattgtgtttatacttctaactatcaaaaggaagaaagaacataaaaatcataaataataaattgaagaatggaggaaaagattatgaacgaaaattttaattctttcatgacagacaataaagaagaggaaaagggcactcagcttcaggtgaaaaaaactcccaagaggaagataaggagcagcgccagaaaagcagcggcaatcgctctcaccggatttcttctgggcggtgtcacaggaggaaccttatatggattatatggaccttctcagaagaatgtttatgcggcagcacaggatggacacaccactttgctgacaacagcttcggaagaggacagtccagtctattcccagtctctggacgtggtggacattgtagagcaggcaatgccttctattgttgccatcagcaataagtctgttcaggaggtacagaattacttcagtgcctttggtatgggctcccccattatggaggaggaggtagaaagccaaggctccggaatcatcattggtgaaaatgattctgagcttttaattgccaccaacgcccatgttgtggcggctgcagataccttatcggtaagttttatcgacaacgaggtgtatgaggcaacagtaaagggggcagacgcagataatgacctggcagtggttgccgtgaagctttctgatatttcagatgacaccatgtctcagatccaggtggccaccatcggtaactcagatgacctgaaggtgggacagcaggttgttgccataggaaatgcactgggatatggccagtccgtgaccacaggtattgtaagcgcgctgaaccgtcaggtccagggaaccgatacggaaataggctttatccagaccgatgctgccattaacccaggaaacagcggcggagctcttctgaatatgaagggtgaggtgattggaattaattcagccaagctggcatctacggaggtagaaggaatcggctacgcgatcccggtatcacaggtggctcctattatggaggaactgatgaatattaccaccagagaacggatcactgacggaaataccggaactctgggaattagaggggccagtgtttcaacagagatgaagcagctctatggtttcccggcaggcgtgtatgtggctgaggttattgaaggcgaaggtgcacagaaggccggacttcagaagggatatatcatcacgaagctggacggtaccagtgtatcctccattgaggagctgaaggaacgcctggagtactataaaccaggagagacagtgacagcaaccctgaaaattccggataggaatggattccaggaggaaactgcgcagatcaccctgggaggctctcaggacacccaggaggaaacccagcaggagacccagcaagatcaagagggttctcagcaggaacaggagcaggggcagtatttccattttggcaataatggaaaatccagatcggatatctaatgtttttatgcttttgaaaaaggaacagctttgtttatcagagtaagatattcattacacacaagagagctttcggcctgcaggaatggcaggccgggggctctttctatatgtaacgaaattttacggaataaagtttacctgtgtttgcgtagtaatgaactaggaattgatcgttaaataagtaacacgttataactttactctactaatggaaaaatattgtcacaaaatgcattttatggtatagtaatactaatttttatttttgttcaaaggtacaagggcgtgcgagtggtacccgtgcgcctttcttttgacagaaggggaaagagggaggaagtttatgtttgacacaatttattcatttgtaaaaaccattaacggttatgtgtggggatgggggatgatctttctgctcctgggtacacatgtatttatgaccatacggaccgggtttattcagagaaagattgggacaggaatccgtctgtctgtgaccaaagaccctgacgcagagggggaagtcagccagtttggcgcattgacaaccgctcttgcatccaccatcggtacagggaatatcattggtgtgggcacagccattgccctgggagggccgggggcggttctttggtgctggcttaccggtgtatttggaattgccacaaagtacagtgaatccctgatcgctgttaaatatagagttaaaacaaaggacgggcgtatgcagggaggagccatgtacgctttggagagaggccttcatatgaaatggctgggccttctttttgcatttttaggagggtttgcttcctttggaattggctgcgcaacccaggtaaatgccatagccaccgtgtgtaaggaaaatctggggatcccccactgggtcatcggagttgtggtggcggttctcacatctttggttattttcggagggatcaagtccatcgccaatgtgtgcgaaaagctggtaccttttatggctgttttctatgtgctgggctgtgtgatcattcttggcatcaattatgattttattatgcccgccctgaagaccatcgtgtccctggcttttaccccgggggcggccgcaggcggtctggtgggaagggggattatgatggctatgcagtatgggattgccagagggcttttctcaaacgagtccggtatgggttccgcacccattgccgccgccgctgcacagacccgcaatccggttcgtcaggcactggtttcctgcacggggaccttctgggatactgtggtggtatgtgccattacaggccttgttcttgtgactagtattatgaaaaatcctgccattgacatgagcactgttacagatggaggaattttgactactttggcgttttcccaaattccttatctggggccggctattcttgtgattggaattatatcttttgcgttttccacggttctgggctgggcatactatggagaacggtgtgtggaatattttgcaggcaaggcagggctgatcccttaccgggtgctgtatattctggttgcagccattgccccggtggtgtccttgaatctggtgtggctgatcgcggataccctcaatgcacttatggccattccaaacctgatcgcagtgcttcttctgtccaacgtgatcgtgagggagacgaaaaagtatttgaataatctggatgcaaaggatgaagagccggtacctaccattgatgagtagtcaggaaggggattacatgtatctggcagtaagtattctggatgtacctaaaataaaaggttggagcatgaagggaagaagcttatgagtgaaaacatcagaattgcggtactatcagatacccatggccttctgcggccggaggtgctggagattgttgatacctgctccattgtccttcacggcggagacattgacaggcccgggattttggaaaccctcagccaaaggcatgccatttatgccgtgagaggaaacaatgacggtgagtgggcatccaggcttcgtttgaagctttcttttgaaattggccaagtgaggtttctgatggtccatgacagacgggatgcagggacggatattcagggagcggacgtggtggttttcggacattcccataaatatgaagaaaagcaggaggggcccaggctgtggctgaacccggggagctgcggccccagaagattttcacagccggttaccatggctgttatgactgtgggagagggaaaatggcaggtggagcgcatagaaataccctgtggtcctaaaggaaaataaagaattttatagaaagaagtccgacaccttatttgtggtgatgcggcggaagaagttcgatttctggtctgacttttccagccgtttcattttaaggcggggacttctttttttggttgttttgtatctgaagtaagctgccagttgcaggttgtgcaaacggcttttatttctgctcttttgaggaatgttttttcctatattttacgcattccgtaagtaaatactcaatttggccgttgatggagcggaaatcatcctcagcccattgggcaagctcattccaaagagaggcggaaagccggagcggtacctgctttttggctttttcttttggtttttgttctgccatgagcattcatcctttctgactttctcatagaaatttcccggattcttggaaattttggaaaaagacttggcagcttagtacaaagatccgctgtttacaatgggctgtgcgtctttgtttccacacagaatcaccagcagattgctcaccatggcagccttgcgttcctcgtccagttccacaatattgttttcatttagctgctgtaaagccatttgaaccatgctcaccgcaccttctacgatcttctggcgggcatcaataatggcggcagcctgctggcgctggagcatggcggatgcaatctccggtgcataggccagatgggtgatgcgcacatcaatgatctcgatccctgcatctaaaacctttgactgaagctcctcctgcataatgtcagcaatttcctggctgcttccccgcagcgttttctctccagagtcttcgcctgtgtcatagggataacagcgggcagcattcctggtgatggaatcacactggatggaaaggtactcctgaaagttttctacattaagtacagcctttgtggcgttctttaccttccagatcaccacagttccgatttcaataggattgcccagttcatcgtttaccttctgcttttggttatccagagtcatggtacgcagagaaaccttcttcttgggtgcagagacggaggaagcggcttctttgttgttggtgtttaaacgggaactggccgtggcgctgttgtcctttgcctgctgctccgcggtgggattgatggcagtacagaaaggatttacccaatgaaagcccggctcatacatggttccgtaataattaccaaacagggtaaggaccagagcctcgttgggacggaggatcttcaggccaaagggaaggatacagccgataataaacaggatgatgcctaaaatgactgtaaaggccaggggaaatggagcctgccctgcgaaaagagaaacgccggctatgattaccgggaatgctcctataagcaaaacaagggaaagcagcagcataagcattcccgatgccccttttatgattttttcctggggtactgataaatttgtatccatattcactcctcctttaagttataaaatgatattgatttgatatcataatactatctataaatgagattgtcaatagcgagactaaggaatcatggaccttagtttgtggaaggtaattgtttctgagaacaaatttttttaatattcgcataattttaatagaatattaaggtgagctgtgatataattttaatatatacttaacaatcacaaagtgttagatttttaagtgattgatttgaaatcaaaggaggagtgtttatgtatcacaaaaagagggttcgtaaatttatgaaaaaatctgcagcagttcttgcagcgacggtactgactgtatctgcaggctcaagtgtggcttttgcagcagattcctataaggagacggaaagaaaatcctttgacaaaggcatggagaagttcgcagaaacttatgatgaacagctggcacagagccgtgagattatgaaaggcgcgatcaaagaaaggtattcccttcatttagaggatgcgggccgttccctgctgggattttttattcctttggacatttcctggctgaatgatgtggctttggacgttgacgttaccatgaaagatgggatagaggcattggattttggcgcttatctcaatgattccaagatcatctccctgcaggcctttttagattttatgaatgaaatgatgtatatgaaggttccggagttttctgacagttatctgaaaggaaagatgactatggaaacaacaggggatgggaatacttccggagagaatggcgtgaaacagatgagtccggagtccttagcacaatatatggatttccttaacaattcagttgatattatgcctgaggcctctgttgcgcaggagattctggaccgctatgtatccattgtcctggatcatatttctgacggcgcttccggggaggaaaccctttctgtggaagggatcagccaggattgtaagtattatgaaggtgagatccacgaagaagatgcaaatgctatggtttcagagatcttgaataccgcaaaagaagatgagcagcttaaggaagtgatcaatactgcggatgagaagattcctgatacggaaaatctctatgatcagttccagaatgccattgagggagcgctgacagaacttgagacagaaacacaggacacagacgactcctatttagtgagcaagatttgggtagatgaccaaggccaaacggtgggacgtcagatttctgtgaatgagggaatcgaatccacccccattttcacataccagatgcctcagaaggatggtacctatggctaccttatagaaatgggagaagaagacaacctcatttccctggtgggaagcggagagatttctgatactgtcatgaacggaaagtttaatgttgcattaaactctgtggttgtggcttctgtggagctgcaggattatgatcttcaggctgcaaaggatggatatggggaggccacctatataatatacccacagcctggtatgatggatgaggaatcctacaatgtatttgccaatttcagtgtgattcttcatgtgaaatcttcaaaggacgcttccgttcttatggaggcttctctggcaagtgcaggtacggttctgggaaccctgaagctggaagtgaatccttcagagtatatggaaattcctgatttcaataacctggaagaagtatttaatatggatgaagcgggacaagaggatgcctatgttgagggcattgattgggacagcttcctggagaactttaaaaaggcgggaatgcctgatgaaatggttgcccagctgaaggaaaatattgatgcagctttagccggagaacaaccggatgtgcaggcagatatcccctctgagggagtacagcctgaagaaaattcggatacacaggaaggtgccggagctgatcagacacctgcggaagaaaagcctgctgtttaggacggtatactttagtttaggacagggatacagtccaaatctagttttcaaaggaatgaattttaaaaaaataggaataatgtctataaaaggtgagtgatccatcagaccatctgcagtttttctaaaatctgcagatggtctgattttattcataggaaagttccctgaactttcctatataataaaaccctccgggggatacacacaatgtctcgaggaaagctgcttcgcagctgcacattggagcacaaagctgttaagcccctgatgagtgaggggatggggagttgaagagggcttgcctgcgttgttatttccatagagcagtaaaactatggtaaatgagaatcttatatttacaagggaacgtatgtttgttataataagcataagcaaaaaaggaaaggagaggggcgttatgcaggcctgtagttctcaggtaaatattcctattcagcttatgtctgtgtgcaatacaaacggggatttaattccccggtggttccggtatgaggaccaggaacatcttattcataccgttcagattcagcagatactatcccacaagaatctggaatatgtgggaacaaagatgatacagtatatttgtcaggcacaggtaggggagcgcacaaggatttttgagatccgctatcatatagacagccataaatggagcttctttcaaatgctggacggggcatgagtacaaaagaggagaggcttttcgaggcagaactgccgggaaaagaagagcctagagagaaatatatttttcatattgatgtgaacagtgcttttttaagctggacagctgcctaccgcatggatgtactgggggagaaaaccgatctgcgcaggattccatctgtggtgggaggggatgaggcctcccgccacggaattgttttggccaagagcattcctgcagagagatacggcatttatacaggtgaaccgctggtgtctgccagacagaaatgtcccaatctcaccgtggttcccgcagattatcatttatatgtaaaggcctcccggtctttgatctgtctgctgagaaaatatacggacaaagtgacccagtacagtattgatgaggcctgggcagagtttgagggctgtgaaaagctttatggcccggcggcagcctttggggaggacttgaaacgggaaatccgggaaacgctgggatttacagtgaatatcgggatttccagcaaccgtctgctggccaaaatggcgggaggcttccaaaagccagataaggttcataccctgtttccctgggaggtgcccggaaagctgtggcccctgccagtggaaaacctgttttttgtgggaaaggccacaaagagaaagctgtacaatctggggatccgcaccgtgggacagctggccaacgcccatttggagcttttgaaggcccacatgaaaaagcctggggaaattatctggaattatgccaatggaagagagctggaggagtatattttttttcatcctcagaataaggggtatggaaacagccttacagccccaagggatgtggagagcctgccctttgccagacagcttcttctgtctttgtgtgagacggtgggaatgcggctgagacaggacaaagtgaggatttcctgtgtaagtgtgagcattaccacctgggaattccagagattccggcgtcagaggaagcttcttggccccaccaatgtaacggaagaaatctatcgggaggcggtgaagctctatgaagagctttgggatagaaggacaccagtgcgtcagattggggtgcataccaacggtgtggtcacggatacagggcggcagtataatttttttgatctgcaaaggtatgacaagcttgaaaagtggaatgaggccattgatgagattaggaaaaagtatggggaagatgcggtgatgcgggccagttttctgaagacgggactggcccatgcagcggggggcctggaccgtgagaggcgcacaggaatcactgcaggaatctgcctggataaagaaaagattttaacctcttgaaagaagcccccgcctcaatgcccaggaggcataagcggcaggagagattttcttgtgtaaaagagacggaaaaacagggaagaagggaattgcttatatgtgtggaagattttatgtggacgagctggtgtggtcagagattaagaagatttgcagggggatagatgctgccagccaggaggttccttccggagatgtgtatccttccggtgaggctgtgatcttaaagggagaggaaggaaaactggcagcgggaaaggccagatggggatatgaaatttctggaaggtcccaggtgatgtttaacgcccggagtgagacggtgaaggagcggcccatgtttgccagagattttcaggagcacagatgtgtggtacccgcaggaaaattctatgagtggaagaaaacaggcatgggggataagacgaaatatgagtttgccatggaggaggagcccttatacctggcaggaatctggcgcagggatccacagggagaacgatttaccattcttaccacccaggccaatgattctatgaagggaatccatgaccggatgccgctgattttgaaaaaggaccagatacagggatggcttttctccagggaggaggcagaccgccttttgaagcagactccgcccctgttgaaaaaacgccccagcgtaccagtaccggaatatgagcagatgtctttgttttaagaaaaaatagaaaaagcaggaaccggcccacacaagagaatctaggaagaagcgggccggtttttgtttttctctggcttgggccagcagcgccgggggatgaagcgctgccctgtaggagctatggatttgggattgacaagtcacagaatagcattataataagttatgaagcgaaccgttaggtaacgaactaatttcttgaatgaaagaaatgagggaggactatgaagcataccggaaccataggctatgaagtgagaacactgaacaatatgctgttcagacggtttctgtgttatgaaagcgggaagggcatggatgaactcacggtgatgcatgggtggatcattggatttctctatgacaaccggcaccgggatattttccagaaggacattgaggcagaatattccatagcaaagtctaccaccacaggaatcctgaagcttatggagaagaagggatatatccgcagggagccggcagagcaggacaaaaggctgaagcggctcactcttacggagaaagggattcagatgcatctggatactgtaaaggacgttgattttctggaggagggcgtaaagcgccatatttctcaggaggatttggaagtatttttttctgtggtacatagaatgaaggaaaatattgaaaatcaggaattttgataaaagaacacagaagtatcggtgcgcttaaaatttaaatttaacaaaaaggaaggagaggatagaatgatcaagaccctgttagggcaggtgaaggagtttaaaaaggcttctctgctcacacctatatttatgatactggaggttctgtttgagaccctgatccctcttttgatggcttccattatagacaaaggtgtggaggcgggaaacatcagccacatttataaagtgggagccatgatggtggtgctggccgcctgcggcctctgggccggagtcatgggcgggaaatatggagccagggcctcctcaggctttgccaggaatttaaggaaggcaatgtatgaaaatatacagaccttttccttttccaatattgacaaatacagtacagcaggcctgatcacaagactgactacggatgtgaccaatcttcagaatgcataccagatgatcctgcgtatgtttaccagagctccatccagtctgatctgtgccatgatcatggcctttgccattaatgcaaagctggcggcaatttatctggcggcggtggttgttctgggaatgatcctgctgtttattatgagccatgccaccaagtattttcagcaggtattccgtaagtatgatgatctgaatgccagtgttcaggaaaatatcacaggtatccgtgtggtcaaggcctatgtgcgggaggagtatgaaagctccaagtttttcaaggctgcggaaaatgtatacaaaatgttcgtaaaagctgagaacctcattgttataaatatgccggtgatgcagtttacagtttatgcctgtattctgggaatcagctggctgggagccaaaatgatcgtgggcactacccttactaccggagagctgatgagtctgctcacctactgtatgaatattatgatgagcctgatgatgctttctatgatctttgtcatggtcaccatgagtattgcctctgcagagcgtgtcacagaggtgctcaacgagaaaacagatttgaaaaatccggcagatcctgtgaggaatgtgaaggacggcagcattgaattcagccatgtggatttttcctacaaaaaggacagtacacagccagtgctgaaggatatcaacctgaccatacacccaggagaaaccattgggatcatcggcggtacaggaagtgccaagaccagtctggtaagtctcatcagccgcctctatgatgtgacagcgggcactgtgaaggtgggcaaagtggatgtgcggcagtatgacatggacacgctgcgaaaccaggtatctgtggtgcttcaaaagaatgtacttttttcagggacgatcctggacaatcttcggtggggagacaaaaacgccacagaggaggagtgcatccgggcctgcaaactggcctgtgcagacgaatttatccagagaatgccggagaaatatcacacttatattgaacagggcggaagcaatgtatctggagggcagaagcagcgtctatgtatagccagggctttgctgaaaaaaccgaaaatacttattctggatgattccaccagtgcggtggacacagccacagatgccaagatccgccaggcctttgcacaggaaattccccagactaccaagctgatcattgcccagagaatttccagtgtgcgggaggcagaccggatcattgtcatggaggacggcaaggtgaacggctttggcactcaccaggagctccttgaatccaatgaaatctacagggatgtatatgaatctcagaatcagggcgggggagactttgaccagcccgccttggcaggaggtgaaaactaatggcagaacaggcaaagcttataaaaggcggccctggaaataaataccggggccccaaacctaaggtggaccagccaggaaagctgctgaaaagagtcctttcttatgtgatgaagtattataaattttctatcgtggttgtggtcattggaatttttgtcagcgtgctggcgaatgtgcagggaactatgtttatgaagaccatgattgatgactatattgttcctcttgcaaaagctcagactcctgattttggcccctttgccatggcgatcctgcgggtgggcggcttttatcttattggtgtggcggcggcttatacctataaccgcattatggtgtatgtgactcagggaactctgcggaatttaagagatgaaatgttctccaaaatggagagcctgcctatcaaatattttgatacccattctcatggggatattatgtctgtgtacaccaatgatattgataccctcagacagatgatcagtcagagtataccccagatgctgtccagtgtgatcaccattgtgagcgtttttgtgagtatggtgattttaaatattccactgacgctggttaccctggtcatggtgagtattatgctggtttcctccagaaagctggcagggctcagtggaaaatattttgtggagcagcaggtaaatattggaaagatcaatgggtatatagaagagatgatggaaggccagaaggtggttaaggtgttctgccatgaggaggaggccatggagcggttcaatgagctgaacgatgccctttttcatagtgcggacaatgccaataaatttgccaacatgttaggtcctgtggtctctcagatgggaaatatcagttatgtggtttgtgctattttcggaggtatcctggccatcaacggtgtgggcggttttaccttgggaggtctggccagctttcttacctttaacaaaagctttaacatgcccatcaatcaggtaagccagcagttgaacagtattgtcatggctctggcaggggcaaaacgtatctttgaccttctggatgaaaaggcagagaccgatgaggggtatgtgaccctggttaatgtgacagaggaaaaaggggtactcaaggaaagcccggaccgtaccgggcgctgggcttggaaacattatcataaagcggacaaaaccactacttatgtggaggtgatgggggatatggtgctggatggcgtggattttggatacaatgatgagaaaatcgttctccacgatgtgaaaatgtatgcccagccagggcagaagattgcctttgtagggtctacgggagccggaaaaaccaccattaccaaccttctcaaccgtttttatgatattcaggacgggaagatccgttacgatggaatcaacatcaataaaattaaaaagggagacctgcgccgttccataggaattgtgcttcaggataccaacctgttcacggccacggttatggagaatatccggtatggcaagctggacgccacagatgaagaggtgatccaggcagcgaagatcgccaatgcggatagctttatccgcagacttcctgatggctacaacactatgctcaaggggaatggctccaatttaagccagggacagagacagcttctggcaattgccagggccgcggtggctgacccgccggtgctgatcctggatgaggccaccagttccattgacaccagaacagaacgtctggttcaggagggaatggaccgcctcatggaaggaaggaccacctttgtgatcgcacacaggctgtccacagtgcgcaacagtgactgcatcatggttctggagcagggacggatcattgaaagaggctcccacgaacagctaatggaagaaaaagggaagtattaccagctctatacaggcaacagtgtggccggataggatgatgggacccagttcctgaaaactttttcgattcacgttgagtccaggggaagaatgttttataatcatagtatgtgtaggaaatgagtttacaacaaggaaagattcttgtgaggaggaacagagaaatgaaaattggtattttaggtgcaggggggattgcacacacaatggcagacaccatttcaggaatggtccggcagaaaacacctggaattgaagcctacgcagtgggcgccagggatctggaccgggccagtgcacttgcccgggactatggttttgcaaaggcctatggctcctatgaagaactggtatcggatgaagccgttgaccttatctatattgcaacgccccattcccatcactatgagcatgtaaagctgagtctggagcatggaaaaaatgtgctgtgtgagaaagcttttatggtaaatgcagctcagacgaaggaaatgcaggagcttgcaaagagtaaggggctgcttctcacagaggcgatctggaccagatatatgccctccaggaaaatgatcagggaggtgctggacagcggagtgattggaaccccaacctctcttacggcaaatttaggatacgtgctggggcacgtgaagagaatgcaggaaccgtccctggcaggaggcgcccttttggatctgtctgtatatcctattaatttcgccatgatggcttttggggatgactatgattctgtcacttcatctgcggtgtttactgagaagggtgtggaccgcagcaacagtatcacactaacctggaaggatggaaaaatggctgtgctgcatgcgaatatgctggccctcacggacagagagggtgttgttttcggagacaaaggttacctggaggttcagaatatcaataacccagaggaaatccgcgtgtatgatctggatcggaagctggtggagaaataccaggttcccaagcagattactggctatgaatatgaggtagaggcatgccgggacgcactggaaaagggagagctggaatgcgggcagatgcctcataagactacccgccaggtcatggaattgatggataaaatccgtaagcagtggggacttacttatccctgtgaataagcattgctttcaggccctgtgggacagcccaaatccgtgaaggagtcctgtcttgtgaataaccagccaagatggaaatgcagtacgtgcccccaggggatttaataaatagaaatagcagaaagattggagagaattccatgtatcgggagctgagctttcggattccacaggaatataatggcaggaccattgaaaagtttcttaaagaatatgcaggttttacgaaaaagcagatcagccaggccaaattcaggcctggcggtttctgtgtaaatggaattcaaaagcgttgtaaccaggcacttcagaaagaggaaatcctcaccgtgtgtattgaggaggcgggcaaagggtccgttcatctggtggacagttccgggagacttcaggttctctatgaggaccaggatgtgctggtggtacataagcctgcagggattctatgtcatccaaccaaggggcatttttcagagacactggctaatcaggtggctgcctattatagggaaaagagacagatggtgactgtgcgtcccataggccgcctggacgcagaagtgtcaggggctgtagtatttggaaaaaatcagatggcggcagccagactgggaaaacagagggaggcagggctgtttcaaaaggaatatttagctttggtgagcggaagagtagaagaggaacttcttattaaagaacccataggctctcatgaacaagaaatccataaaatgcaggtgtcccccaggggaaaacctgcctgcacgagagttacacctttagaaataagacaggataagacattggtacagtgccggatctacacaggcagaacccatcagatacgagtccatttgtcctttttcggacatcccattgtgggagacttgttgtatggaggtttgccaaggcaggataagggaatctgtctccatgcccagacagttcaatttgttcagccctttacaaaagagacggtacaggtggcagcgaaggctgtttcctggggacaaagagaagattaaaagtattaaaggacgccgaaaatcctgctttcgttgtgaaagcaggaacgctcaggcgtctttttaattgctgcctttatatttctgtctgtatgtatgggctgacagatgctccatttctttaaacacccggctgaaatatttttcatcctcatagccaaccaaggctgcgatctccgaaatctttttatctgtttggagaagatactttttggcgtggtttatccgtaccttctttaaatattgaaccagattcatgccgaaaagggatttaaatttgcgggagacatgggcttcacttaaatgaaactggccggcaatctgtccgagacttagattttggttataattctggtcaatataatatttgatctgaccgtaaatatcgcctccatcagaggataggcaggaattggtttgtttgtccagccgttctttttccaactgggagacagctttttgcaaggcatcataaagcttctggggctgaatgggctttagaatgtaatcgatccctccctgaaggaagatctgccgcacatattcatagtctgtaaagccgctgatggcaatgaccttactgttgggggcattgtgataaatccagtccataagctggattccgtctgtgactggcatgcggatatcggtgaggatcaactctggctgatgctgctggatcagagagattgcctgataaccgtcttcagcttcataaatctcttcggcattgtaatccttccaatttaccagaagaccgatgcagtcgcgcacgggcttttcatcatcaatgatcagaactttcataggggcctccttccaggcaaagggtcagcagaacagacaatccataaggagatttattttccagagtgaccgtggcattgtttttataatataggtttaaacgggactgtatgttgatcagtccgatcccaaaggcgttctcatcattgtcaaagattgtggcgttttccagacaggagatgagaggcttaagagtctccaaaggaatacaggttccgttattttctacctgaatttttaaagtattctgttcgatccaggaggatgcgctgatctggtatccttcttgtctttttacaaatccatgtttaaaatagttttccattaaaggctgcaggatcattttaggtaccagaagccccagggtatccggggacggattaagcttataatggagttggccgccaaatctttcatgctgaaagagcagataattttccgcatacagaaattctttgtccagtgtgatcaaggtttgctttatatccatggcataattcatcatcagggccagggaggtgatcaaagaatagagctggggagcatccttttttaatgccagggtcgccagagactgcagagagttatttaggaaatggggatttagctgagcctggagcatgcggagctgtgcgtttttattggataatttcagttcatattcttggatgatcatagcattgatggtgtctaccatggaatgaaacgttctgtttaatacaccaatctcgtccttttgagtgagaggaagaggttctaaaggctgtccaagctttaagtccttcatctgctgggtaagctgttcgatgggagaggtgaagcgggaggaaattttgtatactaccagtacggaaattcccagaaacagtaaataggtaggcagataaatacttagaatctggtttacatcactgtgcagggaggataaggggatggattttaccagaagccatgtggagttcagcagctgaatggtttcatagaagtaaatacaagacccttctttgtagaggaagcttccgctgtctgtatcaagttttcccaggctgtccaatggaagagcaggctttgtgccttgctcttgggaagtgtctgtggaagtgatgagctgttgtgaagttttatctatgatatagagattttcttccccgcttatcatttgggaggaaagggtgtccaaggtagctggggttacatcaatggccagttttccaagataacggttttgcggcacactgtacagaggcatgatgatggtgaaaaccttttggtgggcaacacccaaaatttgtgtattgcccacggtatgactgtcatgggtgggaagaatttgtggtgtgtcaacagaatcaataagggtggtatcgtacagtttcttattgttattcataatggacagacgatttttgctgaaaagataagcatttctctttgtcgcactgtccagataaatggaggagatatcctcagacagttggtagatagactgcataaaagctgagatggctatatattcatcatatttcaaagaattttttttgttgagaatgctgtagacagtggtattgctgtagggataataaatggcatcagcgatggcattgagataggtatccacattatagcggaactggtacatgagatttttcgtgtaggaggtggtctggtttttgtagtgatctacagaataccagtaggtaataaacatagcaatggaaaggggaagcagagaacacagcaaaagtacaagcatcagcttgttgcggatactatattttaaatgcttcattttcatgccctccttaactttttcagtattataacaaactacaaatcaaatgtcaaattatactatgaatacttggaaaataacaggaaaaataaaaaaatcaacaaaattaacaaatatatccacctttttgtcaaagatgtgagtggtcaggagaaactgttttttatataatcaccttatggaggtgagtgaatgaaagaaaatccaaggaccagggtgttcaacgaattgatttttgtggctcctgcgcttattttattttgtatgtttttgatcattccgtttgtgttcagcatggtgacctcgttttcaaagtggaatggcatttccaatgattttcaatggatcgggctgggaaattatagaagagcctttcaagatgaaaattttgtccgttctctaatttataccattaagaatactgtggcagtgaccattcttgccaatcttgtgggattgctgtttgcattggccctcacggcagggatacgggccagtggcttttttcggacagtgttggtgctgcctaacataataagcgggattattttaggatttatctggaaatttatttttatgaaaggtctgccggccattggagaattgctgggaatcgaacttttgaagatgacctggcttggcagccctggatcggcattttggtccattgtgatcgtaggtgtatggcagatgtcaggttacgtgatgctggtttatattgcaggaatattaagcatttccaataccatcattgaatctgcttatgtggacggcagcagcaactggcagctgttccgatatattctggttccatatttaaaaccagcatttttaatttgtattttctggactatcagtaagaatctggttttgtttgatcttccctttgcccttacccagggaggacctttcaagtccacagaaactttggctattaatatctaccgggaggcatttgagaaaaataattacggttacggctcagccaaggcaattttgtttttcctgatcgttatttgtttttctctgcttcaggtctatgcaaaccggagaaaggagcagaattaatatgaagacaaaacatcccagagcggttatggcattggtggttttgtgtgtgattttattcttgattcctttttatctggcggtattgaattccttcaaggaaaatggggagctgctcactaacattctgagctggccgaaaaaatttaccctggataactatagacatgccatggaacagcttgactatgtgcgggtatttatcaattcagctattgtgaccattgccagcaatgggggtgtaaccgtgatctctgcaatggcagcctaccgtctggagcggtttcccacaaaatttaaccggctggcagctttgattctactcacaggactgatcattcccttccaggtggttatgatacccttggtgaaggtgttaaaaagcattcatctgatcaattctctggcaggtgtgattctgacctattggggtatggggctttcctttaccatatttttattccgggggtttataccaggtataccaagagaaatggaggaggcggctgtgatggatggctgttccttgattcgcatgttctggaaaattgtgtttcccctccttaagcctatcattttcacggcagttaccattaataccttctggttttggaatgatttcctgctgccccagctgattttatccaaaaaagaactgttaacaattcccattgccatcaatgcgtttttcggtcagtatgttatgaaatgggacctggctcttccggcactggtgatggcagtcataccggcagttgtggtgttcctgatttttcaaaaatatattgtggaggggatggtgacgggagctgttaaagggtaagtgcgtccagaaaagggcggttggtttaatgggtggaaatcccatacggcaaggcgtagcgagccaccgttagcgagtcttgggtgctgtctggtaacagacagggctaagcgtagacagttaggaaatagggttgcaatgctatagagcttcgaaattttacaaagcttcaaaggccgacgcagtttacccatgcggaaggcagcatcacagcaagcgataagcgagtttgttgtggctttggcggagtccgagggccaatcatgtttcacaatgaccaatcagtcaactggagagagtctgcggtctcttgtatgtatttacaagtatgacgtacaacgatgacaaggaggaaatcaaatggaccgcaggcagtcggatattcccatactaccaaagaaaccgctaatcacggtggagggaaggggaatacataataacactttttctgaggacacatttgccgtactcagggacgggagaacaaatggaaacgaaattagaaagaatagcagacaagtcggctcatgaagtacgaccgatatttacatcgctgtatcacctccttaatgaagaactgcttctgcagtgccaccgggagctggacggaaagaaggcagtggggattgacaaagtgaccaaagaagaatatagccaaaacttgagggaaaacatcaggaacctggtgcatcgtcttaaggaaaaggcatataaaccgaaaccggcgttacgagtatatatcccaaaagcaaacggaaagaagcgccctctgggtattgcggcgtacgaagataagatagtacaattgggcttaaagaagatactggaagcggtatatgaaccaaagtttgcggaaaacatgtatggtttccgcccgaaccgcagctgccacatggcgataaaagaaatgtgtatcagcatcgtgcggaaacgtatcaattatgtagtggatgcggatatcaaagggtttttcgaccatatgagccatgaatggacactcaagtttgtgggatattacatcaaagaccccaatatactgggtctgataaagaaatatctaaaggccggggtactagaggacgggacataccagacgaacgaagccggttcagcgcagggaaacatcatcagcccgatattggcgaacatctatatgcaccatgtactggtattgtggtacaaggcatattttgagagacgcggagagggagagagttttctggtggtatacgcagatgattatctggcaggatttgaacataagagggaagcggaacgctactataaagagatgcaggagcgtctaggtaaatatggactggagattgagacgagtaagagcagactactggaattcggaagatatgcgaaggaaagaaggaagcgtagaggagaggggaaacccgagacctttgatttcttagggtttacattctattgcggtgagaaccagaagggaaggttctgcgtgaaacccaagacaaatgggaagcggttcggactaaaattgaaagaaatgcagaactggctgaaacagatgcgcacggtaccgataaaggaattgatgccagcgttgaaccgaaaactgatagggcactaccgatactatgggatgacatataatgtacaatcgctggtgaagtttcactattatacaacccagttgttgtacaaatggatgaaccgaagaagtcagaagaaaagctacaactgggagcagttcaagatgatgctgacgtattatcccctagcctatcccaagagatactacaatctctatgcgtagcttataactgtgaatgttattatgaagagccgtatgcgggaaagccgcacgtacggttctggaaaggatttcatactgtgaagtatgattttactagaccggatctttgatctgccccagcccaggcggaggatcttgggaaattttatacaaagaacataaaattaaattttatattcaagggaggaagaaaacatgaagaaaaagttatatcgcacagtagctgtaggaatgggtcttgccatgcttttgacaggcgcacagccgtgggtggtacaggcagatgatcaggagaaagttacattgaaggtactacagtttaagacagagctttctgagcagatgaatgaaatggctgaaaagtatatggaggagcatccaaatgtggaccttcaaatcgaaagtgtgggctccaatgactatgacacggttttgaaaacaaggtttgccagcggggaggcaccggatatttttaacaatgaaggctttaacaaaatgaatctttggatagagaatctggaagatttatcagatcagccatggattatggacatgctggaattcaccagggaaggaattacctctgacggcaaggtttatggattgcctttatatttggaaagctatggatttctatacaacaaagattattttgaacaggcaggaattgagaaggtacccacgaccttttcggaaatgaaggaggtagtggaaaagctggaggcagcaggaatagcagcattttctgtaaatgggtctgagtggtaccccaatggtgttttttttgccaatatacccatggcactccaggaaaatcctacagcgttcattaatgagctgaatgaggggacagcagcctttgtggataatccattgtacaaggattggatccagcttgttcagcttcagaaggagcatgcagcgagtgatcccatgtcggttgattttagtacggttgtgtctgattttgccaatggcaaggtggccatgatactggggacaaatggttaccagcccatgattgatgaagtggacccggagctgaatattggtctcatgcccatgcccatcaatgatgatgaaaaactcaacgataagatttatgcggcagcgtccacctattggtgtgtgaacagccattcccagtcaaaggatgccgccaaggaatttctcaactggctggtgacctctgacacaggaattcagtatgttacagaagactttggtcttattcctggactgaaatcaatcaaagcgaatgaagaggcagtagggccccttggaatggatacgcaggcatacattgaccagggaaaaattgccggatgggaatggccgaaatatccggatggagcgaccattgaactgggaagtgcggttcagaggtattatgccggtgagattgacggggatgccatgctggagagtttccaatcaagctgggatgatctgaaaaataattagggggataggctatggtattagaacgatttcaatgtataccctttggtggagattattgtccagagcagtgggatgaagaagtttataaagaagatatccgtataatgaagtattatggggtgaatacggtaaccatcaatgttcatgcatgggtgcttaccaatccctctgagggggtgtatgattttacttttttggataagattgtagaccttctcacaaaaaatcatatccgtatcataatgggaaccagtactacagcgattccaaactggatgggaatgaagtatccggatatgattcttacagataacagatatcttcatcataccatcggagtccgggaaaattattgtaccaacagtggagattaccgcagattcgaaaaagaaatctgtgaaaagctggcagagcactttcagcataattccaatattattctctggcatatggcaaatgagacaggtctggtttgttattgtgagcattgtgcacaggcatttcgggaatatctgaagaagaaatttcatacgctggatgctctaaataaggcctggaatacaaatatgtggggacataagtatacggattgggagcagattcagccgcctactcccagaaacgagatgtatgaaaatgtaaacgaaattcccgggaatcatcttcattgtctgcctgcggaagccattgagtattatcgattttattcagaatctcatagagagtgttatgagatagaggcagccgccataagaaaatatattcccaatgccattgtaacaaataatttccagttccgtactttggattatcacagggtatgtcaggtgtcggatgtgattgcctatgattcatatcctacaaagcgtgagaatcccattgtggcggctttcaattatgatatctgcagaaatcttcaaggggtgaacaagccttttatgataatggaaatgtctcccaaccatgccagctgggaaaactgtgctgcggcgaaacgtccgggggaggtaatttacaatgcattaaaagggatcgcacatggagcagacagtgcgttgtttttccaaatccgagcatctcaggctgggtttgagaaattccatggggcaatgatcccccatgctggccatgaaaataccaggattggaagggaattaaaggagctgggagaggatttgaaagttctggagccctatctggatggaaagcaggtacgtccaagagtggcaattatctgtgattttgacaatctgtatggtgtggaaattccatgcagtattcacaaaaatatgaattatatggaggaggtacagtactattatcgatatttctatgaaagaaatattatggcagatgtaattcagtgtgatggggatttatcttcctatgagcttgtggcggcacccatgctttatatggcggatgattcctgcattgaaaagataaaaaaatttgtccgaaagggtggcacattcattacaacctataacagcggtctggcagataaaaacgacagactttttccaggagcatatccaggagctttccgggacatgctggggatttgggtggaggaatttgacgctttggatactgacgagaagaattctatggttatggaagatggaacgagctatgactgtggattctggtgtgatctcattcatgcacaggatgcggttgtgcgggcacgttatgggaaagatttctataagggaatggcttgtgtcactgaaaagaaatatggtgaaggtttgggcgtatacattgggacgaagccctcgccggaagctgtggatgccttgctggatgactattgtgaaagactggggattcatgggcttatgaatggacatggcaaggttgaggcctatattcgtgaggatgagaaggaagagctgttgtttttgttgaaccatggtcaggagggtacagatgtaaagcttgaccaatatggggaaagtcagatcctcataggagaaaaatgtgagaatacggtacatctcaaaggcaagggtgtggctgtactgctcaggaagaaagaatagaagaagggacagtggttaaaagatagaatataaaaagctttctgcggttcaccggtttgggtggcagcaggaagcttttttacgtttttttaaagcacaggtgaaattttttcttgagttaggaatgaagctgtaaattagattcgtctatgatggttttatgaacaaggttaaataaagaatttttccactacctgggcaattccatcctggtcattggagccagtaatataatctgcaattttcagaacttcatttttagcgtttgccatagctactccaagacctgcatactgaagcattgttatatcattgtagccatctccacagcagaccatggcttccctttgcaggttgagaatttttaaaagctttgccaggcagtatgctttatctacatttttaggagttgcctccaaatagaaggattcagaccggaaaatctgggcctcgtggagatatttttcctggagaataggttccaggcgggcgatatcgtccgggtctccggtgagcagacatttgttgatgggataaggaatgtcccgggtatagttgtcgctgagttcaataggaagatggcagattcgagattctaattggatatattcatccacacacattcctccggaaaaaacggtgtcatggtcagagtaggcgataattcctacgccatattccagggcgtctttttgaagacgtctggggagagtcagagggagcgtttttgagtaaataacctcttttgttttccagttgatgattctggctccattaaaagccagaacatagcttccgaaacgttcaaattccagggtatctgcaatgggagcgattccctgatggggccgcccagaggcaatagctaccggaattcctttttcctgaaggtggatcagagcctcccttgttttgggagtaactattttttctgaatttgtcaccgtaccatcaatgtccaaaactaaaagctggtagttcatagctgttttcctttatcatactaagatttgtttcgatttggcggctgtgatcggggtttcttggctgtttttatgaatgcatgaacaggctgtagtgagaaccgccggattgaaacgtagtatctttattttggcatagaaataaaggtttgtcaattttttgaacgtactttcgaagaggatttacacagtggctgggggatttattgttgtagttgtgggtgttaaaaattcgagtgacttgttcacaggtgaaaggcagcgtttggtcattgcatgtggcaactttcagggagtttatgtagcattgttagaatgagattcaggtaagctgtaggcggagaggccggcccgatttcaatcaactggttcgttggaatgagaccgggatcacgatcctgcgcgacggttacacaatgtttcaatcgactcattcgctggaatgagaccatccaacgccaataccaatgtatccatgttggggtttcaatcaactcattcgctggaatgagacagcaattatgcataaaaataagcaaggattttgtgtaaaatgtacaattagatatactaataataaatattttaaataatctcctaggaatttatcgttaatacataaaatagtgatattattttggtgcgaatctcctggaaattcatgagagcttgggattcgcattggtagaacaagtcctttgtgttaaaaatcaaatctaatatattttagcagttaattaagtacatagatttttgtgacataggttttctcaatgcaatatttcaatttgaattttaacataagacatggggtgtgtccagagtatatgcatattctaagttagcaaatataacatatatttcaagtcctatttggatacaaaaaatctgtaatagatattattaagcgttccaattatcactaaaattatcataaaataaggaataaatgaagacggtattataatgttaatattactatgtaatagtgttaagagtaacataaagcataataaacttccagctgtgtaaataacgtttataagaattctcatatactttggatatctccaaagtttagtatgacttaagatatttaagcaacttgtagctataaataatagaaaaattgcaatccaaatacttaaataaaaaggttcacataaaaagaaaaattctattactccaaatagaattaattgtagaataatggaattaataaatgtgaaaagtttaggagttttagcatttttataattttttaaaatatttccacaaaactcagaggagtcatcaccgataattgcagataaacccttaccgtcattataagaacttaaccccagtcgaattaaatcattttttatggactctatttcggtatttggtaaattatttgcagataaataatttaaaatattttctaccatttcttgatcacgtaaatccaagttattgattaataatttattacacataattatcaccttcctttttggcataccttaaaattttggctttcagggcattggtctttgtctataacaaatccgagagcggtgaatgacttgtgagtttgcgatgtagtttgtggctcttagtgacttttttcgctatttccttaaaaaatttcttagaatcattatttaaagtgttttatttaattatagtataatgcattataaaatggatgtcaatacaacaattcttgagtttccgcagatttatccacaataccagcagaacatctgcatctttatcaacaactttcaagaaatgcccaaaatatgaggaatctgattcctttttgatgtaaaattaagctaccaaccaaaaatcttactaaacaaaaaagaaggagattcctcatggctaattttacatcagatatctacaaattgaaacgaaaaattttgaattttacaaataaaatttcccgacagctttccaaaccggatcgtaaatttactgcggatatcacttatggcatgcttgcttccggaagctgtcttctgacggatgtggttgaccagcttcatgaagattctaaaaaaataaatatcgttgaccgcctttccagacatctggaaaaaggggttcccatccaggctgccagttcttaccttcaaatgattaagaaatgggtccctgctgaccccattattcacattgatgacagtgatgttgtaaaaccggacggatataagtttgaggctcttggtattgtcagggatggctctgaaagcacttccacaaagaatgtttataaaaaaggataccatgtgacggaagcctctgtgctcacctccagtaaccatccagtcagcattttttccaggatccattcttctttggaaaaagactataagtcagccaatacgatcactttccaagccatggaacagggggcggctctctttggaaaggctacttttgccatggaccggggctatgatgacaacaagatgttcctcaaactggatgagctaaaccaggactacgtgatccggctaaccgctaaaagaaagctcctataccacaataagtggacccctgccacagaactgcgtgaccgccgcaagggcaagatcaaaaccagcgtattttataatggcaaagaccatgaagcctatctatcccatgtcaaagtgcagataacagcttcacgaaagaatatctatctggtccttgtttatggcatcacggaacacccgatgatgcttgccacaaataaagagatccgatcaaaaagtgatgtcatccaagtggcgcgtatttatttttcacgctggaaaatcgaggaatatttccgttgcaaaaaacagatgtttcagtttgagaacttccgtgtccggaagctttgtgccatcaatgcgcttaacttttatattaccttatgcatggcctttcttgccatgatgtccatggcatcagaaacaaatgcactaaaggtttcaatcataaaaactgcagctcctataaaagaaaaagttttcttctgctattaccggttagcaaaaggcatcatgggcatactgtcgtatgcaaaagagggcgtcaggctctggttcaggacaaagcgtcctgcttaccgtcaactcagccttaagctgaccgcttagatagataaaagaatatgtctcctaaagctcggttccggcggggcttattcaggtgcctctattctacaaactgtccttctgaacttttctaaaaacgggcagattggcactttagcaaagcatatccatttaaagattacattttgcggaaactcaagaacaattacttgaggatattttattcaaaaattaatgagaccattgtgttattgcatatgtagaagatacataatactacatttcaggaggtttattattttgattaatattaccctttatggagttaaaatgatatatccctactttagtattgtgattttaatgtactccctcaccagagggagacgatagctgcccttaacctttcttgatattcatcgtgatttcaacccactccctcaccagagggagacctggtttagaatcctttaagcgcggggttaatttatttcaacccactccctcaccagagggagacggcgaccaagacagacgacggaaaagagacttttatttcaacccactccctcaccagagggagacaaaagacaatccatattatgatagcctatgtcacatttcaacccactccctcaccagagggagacagcaattgtgcataaaaaaatgcagtaaactttatcatatatgcacaattaataactaagaaacacaatacacccccccgtcatccccgtatttcttctctgttacagagaagaaatacggatttttctggtgcgaatctcccgggaatttatgggagcttggggttcgcactagaagatgagggggtcttccacgtgaattcctttgtcaacgccaatgtgttctacctttgtcttgtgtttatttcccagatagtagaatctcaggctatctactttttcgtcgatgagatctgtcaaaatagattttagcataaggcactgggcattgtccaggatgcattcaaaaacagagttttgtacccgggttccgtagttcacgcattgcttggcaaccttcctcaaacgggtttttccagctgcggtttccgtgtttacatcgtaagtgatcagaaccagcatgaactgcctcctttctatttccaaatctatttccaaaaaaacggtggatattggtcaatatcgcccctgagatagcgggcaagaagcatggcctggacaaatgggatcattccccattccactttttcacccagataaggatgggtgatgacttccttctttttattctgccattgagtgagaaggagctttctggcattttcattcatgatcactgccccatcctccttttgggaaaaatcttttccagacacgatctttttattgatcaaggtaagcacaaagcggtcagccagcactggccgaagttcctcgattagatctaaggccagagacactcttcccgggcggtctgtatgcatgaaacccacataaggatccagacccacagtctccagtgcagatgcagtcatatttgttagaagagtgtacacaaaggagagcatggcatttacattgtccagaggcggccgcttatttcttccatgaaagaaaaagtcttttttctggtgcaggattaattcatcgaagacgccaaaataaatgctggccgcctctccttcatagcctcttagctgagaagtatctgaacaggactgaatataacccaatgcctgctgtaaaaatccggaagcttttttcacagattccactggtatctgcaaggcgtggtcacatatggcgcgctccaggacccagcgggaattgtaaaccttgcccaaaatacagtttttggcaaagcccaggctgatgtcagcatcggaggaggattcatactgcttttttcttaaaagaacatttccctttacgcttccggtaatacgggccagaaattttccctgtggggtcatgaagcacacagacagatttctgtctgcgcaggcccccataagggcaggactcacaccccggtaaccgaaggagacaatggcttccagattgtgcaggggaatccggcccagctcctgttccttttctaggattacaatattttctccatccagggaaaggtagctgtccggagaagtcacatacaaagtatttagtagttttttcatgtttcctcctccgtaatcgttttttggatatattctttcacagaagtgacttttcccagtctgggaaggcatagatccttcaaagaacaggcattgcagcttttcgaccattttaccttgggggtataatgagagttaaacaaatggtgcatttcctcaaaggattcctgaacctgtcggcgaagttccggggtaaaaataattttctctctgtgatgggtctcaccataatataaggcaccttccggaatctgggttaggagcatctcctccagacacatggcctgggctgtgagctgaagaatatcgatatttgtcaccttggggctgccttttttatattctacggggatgacctggaacaaacctctgtgtccatagacggagattcccactgttgctctgtgaaattccacaagatcgcagacgccgctcacacccatagttctggaatgcacaggcatacccctgctgacgatcacgtcctttctcttttcagccagataagggtcatgggctcttttatgcatgatctctccctgtacggtatgttcattttcctgccactgctgctcaatatggatcagcgcccattgtcttctgcaaaaggcaaaatgctggatcccggacagcatcaaataatcatcttctttatattccatcataatttcctttgaatctccactgtgtcaggaatcagttcctcatggatggcaatggtgtaatccttatattgtctgggatagatcacgtccggatccttttttacctcaactgcgtcaaagagcttgtaggcaggacagtctcccagttctttgctgtgtttaaatacgatcagctcccgaacagccatttttcctctggcagcggaatggtcgatttcaaacatgttgatgatggcttcccagagcaattccaggtcatcctgggaaaatccagtgaccttccgggcaagattggcagagatataaccttctgcccggtacagagcatagggtacaatgttttttctgcccatctcggtgcttttgttttcggcatctttttctgtggttatggccacacgggtgatggtgacctcctgactgatgatggggtcaatacttctggcaaatcctagctgtacagggccccgcacctgcccgcagtttaaagctgccttcacaaaggtggtcatgacggcgccgaaggtgcggatgtcgtagaaattggcacacataaaatcgcggatttttctgtccacatccggatcttttttctttaattccttaatgcccttttcatcggtactcaaagctttatatgcctcgttgtcgcttctgtttaagggaacgtcctctttaatatagattttatacccttctgatccctcttttacggtctctacataattacggatttttcgcttcaggcatacatctgtgacgatcccatagccgctttctggatcgatccggggaaggttgccggcatctgggtctccgttgggatttccgttttcaacatcaaataagatcacgaattcatatctgttcttaattacctctgccatattcttagtcctccttattctttttctcaaattgcttctgggtctgatgatagtagcccagaataaacattccctgttcctccagagacagtctccttggacatgcggtgctctgatccggggaaacctggagtttgtcctggatgcttccaagcagcttttcatagtagacttctgttttgccgtcctttatcttttttatatgactgtttttcagcttaaataatatggggaaaatagaggccggcgtggcgcaggcagaattaaaatatttgtccttgatggtggtgttcacctccggattggcagccctttggactgcctccagaacagcaaactcccggccaagaatataagcagtatttgtacattcttcatttaatgccatggtaatctcctccttggtatgatttccgtttcggataagaaaggcttttataatagccgcccgtccccgggtgattttataaatatgagcatccttatcatcttgctctgcacggatccgtccaagaactgcctggtacagagcatcgggataaggactgtctgagatgacacaacgatatacagccccgggcaggttcggggcgggctttttgtccctggatttcttatttacggtttcctggagcatacgccagatccccagatattttaaggaatcaccgaaggatctagcaatctccatccggtcatagtgggcctgcagatgttgcaggatatttccaaagctgtcctgataaaaaaatcgcaccgcaatcctggccgcgttgggggccaggcccaggatataaaagggctggtccatggaaaggttttcatacactttggaaacagacacagccataccagctctcaggtttttaaaaactccatccacaagttcctggttatccaccgtgggctccacagcggcaagaaatgcattttgatagttttcttctccgttctgggaccagtatacaatggtggtgtcaccgatgacagttgtatgctctctgtctgacaaaagataatttaaggcagtggtataggcgtaggcggcatactttcccactggagcattgaagctctgttcttttccataggattcaaaggacggtgcgttgaaggaaaccaaggcggctccgctgctctgggcccctagtacccccttgatactgctgtggattctggcgatttccgttcgttgtccggtcaccaggcagattccatggggatcctttttatcctggctgcaccaggtatcccaggcacgttggatgtgattgtcttcctgggcaaattccccgtctatgaggaaaaccaggtttcctttggcagtaatctcctccaggacctgggcaagaacgggttgctgtcctgccagcttgggctgccacctttggaaaaagtttctcacagcttgggcagcagctcctggcacatcttttagaattttcagatgatgttctctggcagcgtaaaagtattccagggagcgctggggtttgcctttattatctatgccaagaaaatagccggaattgtcgcacaaaaagttgggagatactccggaggagcgggataccatttcaggcacccggatattttgaggaagccagagggtcttttttccactttgtacctctattttcaggtccactactccgagaagttcgccctcccgagagatatccaggccgtaggagacctttgcgctgcaccatccttttgcggtgacccttcccttttccttcagggtctcataataggcagttaatgcttgaagaatcatcggatcacctcacaatcagttaagtccagaacgccgttttttagaatggcgcggaaaaacagaggctgtatattctccagatcggtgtaatccataccgtagagcatatatcccagatctttttcctcctgtgcataggcagttgttacctgctcctgttcatacagctcaatatttgccgggaattctctgcatccaaagtagggcatatgggcgcattcccctcttctgagccggcgtttgataatatctttgaatttcccaggattgtcgccgggagcagcctggggcgtcatttcaaaatgagcttccacaacgtagttgggctggcgcagcaaaatggaggctctctggacaatgtcctgtctggtactgataaaaagcggcttgctgccaccatttatgacagtcattgcgttgcttgcagaaaccttgctttttacttcatttcttctgatggtggtaaatgatatgggattacacacatagattttgtcgatgatccagttcattccgggatgccagtaaacagcttccagtatgcctttggcagcagagggtgtgatcatgtcatagctgcacctttctactttcatctctggacgggagaacagagcatattcaccccacatatgtacctttactccatagctcatgctattcctcctttgttcatattcgtaggataattcttagaagattaccgcctcccctctgtccgtgtcaataaccagtcccatgtccggagaatattgttctttatttctcagcacgtaaaattcgagaccgatttcctccagacggcctgcgccatataaattgtcaaaatcttgttcatagatgttaatgctgtagtgtcccgccctgcggataagctgacggtttttctcccccaaacggatctgccgtgcaatttcggcggcatccggctccaggtccacaagtatggtcctggtgttattttcaatgagccgaaactctttgtctgcctgctgaaaaggaaaagagtaggagggaaggctctgttcaaacatttcaacaatctttttttggtccaggccttcaccttttaaatgatagagacggcggaaatattcatgaatggcttccagggaggagaggtcctggtatttctctgaaatctgccgggtgacagagatgggaagcttcaggctctggggaataccaggcttttggtcttcttccagagtgaatacataggtagagcagtcctcttggggccgtttgccctcccggttgcatcttcccgctgcctggatgacggagtccacccctgccagctcccggtatactgtctgaaaatccaggtccactccggcttccaccagactggtggcgatcaccaggcagtcttcgccattttttagccggcttcggatttcagccagccgttttttacggtgggctgggtacaggaaggtggatagaagataagtgttactgtcttttagagcttcatatacctgctgaacccgttttcggctgttgaggatgcacaggcactgggactggcggccaagctgtgaaagcagctcctcctgggagagcgttcctaaattttccacggtcgtacgtttgaaaaatagatactgttccttcacatcagggcagatctccatggctttgatctggggtgggaaaaattcctgaagggcaggctgggtggctgtgcacagaaccgcagtacatttgtaattatagatcagttcactgatggcctgaatgcatggttttaaatatttcacaggaagcatttgggcttcgtcgaaaataaggacgctttttgagatattgtgaagcttccggcatttggaggtcttgcaggaaaagagggactcaaaaaactgaacgttggtggtgaccacgatcggtttatcccagttttccgcagccagctgggacagatgaagctcttcagagtcttcaaaggagacattgcagtggtcctccagcacgttgtcacttcccagaatatcccgaaaaatctgggcgttttgttcaatgatgctggtgtaggggatcacatagatgattcgtttcaaatcatgctttctggcatgggcaagagcgaaggccagggaggagatagttttgcctccccctgtgggtacagtgagctgatagaggccttgactttgtggcccttttttcagacaggcctttaaaatgcaagtacgtcttgcgttcacagtgtctgtttcctggttttccagccaggggcggatgtgcaggagaagccgttccatcaggacatccatggaatcgtaaatccctctgggagtcgttccctgggtcatgaaagtctctgtatcaagaaaatcagcatccaccaggcaggaaaacaacatgcggatgaaaaaagaaaggctgaacccgcctcttcccaaaggcttcaaaggaggattggagaaatccggaaaggaaatctcacgggaaaattcctggtaatccgccagttccttttccattcgcccgaagaaggtaggggctgtgggtgcgtctgtccttgatcccccgtcggggagtccgctgtggtgtcccacaatacagtaggcggccataagattcttccttttataaagttccctggcgcctgctgtggcatggtcagtgataggaccgccttccaggcgcttttgaaacggaacggaatattttccgatatcatggagaagaccacagccgtacccccagtctctgcatgcaaaatcctgggcgaatgttcctgccagcacagaggttcccagcaaatgttcccggacggtctgcttcctttggccatccggactgatatgtgcataaaacatgaatttcctcctctttattatctgtaaaataaaaaaagtaagaagtattctactgactacaattatacatgagtatatattgtgccgcaagatacttcttacaattcttgatattttatatcctacttttttaagaatgctgataatagaaaacagccagctgggtccggtctctgagctgtagcttatccaggatcacactgatataatttctcacggttccctcgcttaaatataaggtccctgcgatctccttgttgctaagtccttctgacaccaggcgcaccacctgaaattcccgctggctgatgccatactgttcaaaatcaaagctggttcggcgggacagcagctccgggattttcgctgtgatctcaccgccaaatacgctctggccctccatgactgcgtgaagggcaggcaggatgctggcgtaatcctgcttcagcagatagcccttggccccgatttttaaagctcgtacaatgtagtcatcatccaggaaggtggtgagaagaaggattctggctttgggatataagtgtaaaatttcttcagaggcagccagaccgtccatgatatccatacggatatccataagcagcacatccggcaggagatctctgtaaagctttacagcctcccggccattgtttccaacaccgcatacctgaacgccttcctctgcctccaggattgtttttaatgctgtggttataaaaaaatcatcatcaatgagtaatacgttcatttgcagttacctcctccagtttgggaatggatataaatatggaaaacccaggttctttttgaatagaaatggtacctcccaggactcgcacacgttccttcatattggtcagaccgatgccggtatctccctcctggtccgtgctggtgccgttgtcctgaataatgagctgatacaaagccggatgctctctcatgacaatggaggccttgtctgcgttggaatgcttcattatgttagccagcgcctccttggtcacagccagaaagcagtacttaatgtcccgtggaacctccagactcatatcataggtaaaggacatcctgcaaaaggagaagtccttaaggaggccttcggtcccttggcgcaggctgatggaatcatcgtggatatcgtggacgctctggcggatgctgcccatggcagaggaaagcgtatcctccagattggacagaggcgcggccaggggctcctgcttgtttactgttttcaaagcacccagcattaaaatcgaacgggagagcagatgccccacattgtcgtgaatctctctggctatccggttccgctcctttaatgtggccgcataaatttcataatcttgtttttctctgagggttttatttttttcttttagcagcagattcagttctgtgctgtcgtctctggtcttcttgaatttttcttccaaaaggattccctggacggtctgatacttcagataaaaggccagcagacagcacatgagaagataaaggagctgtgtggcaggaagggtacttgtggatacaaccaaaggcagaagaagcagggcacagaaaactggtggcaggaaaaaagctccatcgtatacaaaaaggcagagaaaagccaaaaagccgggataaatgcaagacagtacacagaaaaaaacagcggtcacagctgtaaaacgtctgttattcagataaaagttcatgcaggtgcagataattgctgtgaaaaatccaaagaggaaccaggaatcagcaggaagacagatcaattgaaataaacaaaatagcagcagtatacttttgtctactaaagttttcattccatgctcctcctcactttgcagtcttctaaagtctcttttctttgtctctgtgccatctacccttcctgaaacggtttgatttattataacacaagaagcccctataggggacgtgacaattgtcatcattgaatctgacttgtgacactacgtggacaagaaaaagggggatataataagaacatgaaaaggaggaaggatttatggttgagatagaaaacttggtgaaacggtatggagaggttctggctttggatcatctgaatctgtcagtaaaggaaggagagatctttggcctgctgggtcccaacggctccggtaagaccactgccatgaactgcatgctggctttgctgaaatatgacaaaggaaccattcgtattatgggaaaggaaatgcagccggacagttatgatctgaaacggcagatcggggtggttcttcagaatgtggcagtgttccgggatctgtccgtatatgaaaatatagattatttctgcggcctttatgtaaaggataagcaggagaggaaaaagctggtggaggaagccatggattttacaggccttctggattaccggaaggtaagaccgaagaagctgtccggaggcctgctgcgcagactgaacattgcctgcggcatcgcccacaagcccagactgatcattatggatgagcccactgtagccgtggacccccagagcagaaataaaattctggaggggatcaaggaactgaataaaaacggctccaccattatctacacctcccattatatggaagaggtggagcagatctgtaccagaatctccattttagaccgtggcgcctgtctggccagcggcaccaaggagcagctgaaaaaaatgatcaagacaggtgagacggtgaaggtggagggcattgtgctccgggaggatcagcttgcccagatacagggcctgcctcaggtgtttgcagtgaagtatgacagccagaatctggaagtacgttttaccagcgccaagcacaatctgatccatcttctccattttttggaaaaggaagacattttgttcggacgggtattttcccagctgcccacgctcaatgatgtgtttttggagatcacagggaaagagctgagggattaaggaggagtctatgctgcacaatatgaaatatattatgttacgaaatatcaggcagatcacagggctcttttggagcctggcttttccccttctgctgggaactcttttccactttgcatttgggggattaacccagagaagtacctccatggaggctatccccgtggccctggtggaggaaaacagcgctggacaggagcagaagattttttcagagtatatgaagcagttggaccaggagatcttaaagctggagatcctcaacgaggaggaagcacagaaggccctggacaatggaaagatcgacggaattttccgcagcggggagagccgcagcctggaggttctgggaaccggaattgaagaaagtattctgtccagtttactggaatcctatgaaaaaaacagaagccttctggtaaacatagccaggaagcatcctgcccggctgccaaaggccatagctgccatggaacagcagatccaggtcacggaaaatgtctctcttgggggacgtaccatgaatgaggcttcccagtacttttttgcactggtggcaatggcctgtctttacggtgggttcctgggactgaatgccgccctgcagatgcaggcaaaccaaagcccccagggaatccgctgttcggtaactcccatgcatcaaatgaagcggatcctctccaatgtggcagctgtgttccttcttcattttgtggaaatgctgctggtgctgggatacttaagctttcttctgggagatctggatgtgggaggaagctgggggaaggttcttctggtaactgcttttggctccttgttcggcgtatccctgggtgtccttgtgggaagtgtgggaagaggcggcgaaggagtcaagacagggatttttgtcagtgttaccatggctgcatgcttcctttccgggctgatggtggggaatatatccaatatgatcgaaaaacatgccccaatgattaaccgcatcaatcccgccgccgtgatcgcagatgccttttattgcatctgtgtgtatgaggatatgggcaggtatgccagagatttggggattttggcagccatgagcctgatctgtggatctgcggcacttctgtcagtgaggaggatgcgttatgatagtgtttaaaggttatttaagaggattaaagcagaatgtccatatgatcgtcatctatttaggcgtgtttctaatgctggagagtatttttatcatgtcttcaaacaaggatgtacagaaggattttacccctgccaggtacaaggtggcggtggttgaccgggatgacagtaccttttccaggggattggcagaatatattgaaaaatatcatgatgtggttacttttccggatgataaaaaggttctgtcccaggaattgtattatgacaatattcaatatgtgatcaccattccagagcatgcccaggagctgtatgcagatggggcggtcaagattcagaccaccagtggtgtctcccggcaggacggctggtacattgggacgaaggcacaggagtatgcaaatttcatgagaatttatacccaggctggatatagccaggaggaggctgtccaacaggttcttctggtgggagatgagaagccccaggtgtccctttcccaaaaaagcagcgccagcggaagcctgctggcaaattcattccggtttctaccatatattatgatggccattctatcctatatacttgggtacattttccaggaataccggcagacggatctgaaacgaaggctgcgggcttcagccctttctctgggtagacagaatgcagaggcgctgctggcctttgtcactgtgggactggggctgctggtcctgtgtacggggattgccttggctgcttctccaaaagaattctttaccaacgaaaatcttggatattttatgggaaatgcagtctgtatgatgttagtaagcctttccatcgcctttttcgtgggaacggtggcaaagggggacaacggcctgaacgggctggtgaatgtcattgccctgtctatgtgttttatcggaggggtttttgtaccggagtatcttctgtcagagggattgaaaaaggccggtgtctttcttcctacctattggtatgagaaaagcaacaccatattgggggagcatagcgtactcacggctgctctgagaaatacggtatacaaaggttatctgattcagatcttatttgccgcagcctgtgtggctttgtctctggtgatcatcaaagcaacagagcaggaaaaagagtaaaagcagcggctgggaacgaaagatatagcagcagttattgtttatggccatccgcaacagttgcgcaacagactcaatgggaacatccgcttgatttctcttgaaatcgaacggatgtttttgtatactgaaggtaagagaggatgtgagcacatgcctgaaaaagtaatttttcatattgacgtgaattccgcctttttaagctgggaaaccgtgtaccgtttaagtttgggggagacggtggatcttcgcactattcctgcggccattggaggagaccaggcaaagcgcaggggaattattttagccaagtccattccggcgaaaaagtacggtgtccgcacaggggagagcatcatggaggcaaaaaagaaatgccccaacctgcttttagtgccctccaattatcagctgtacaagaaatgctcggaacagtttatggagattctaagagagtattctccggatgtggaacagtattccattgatgaggccttcatggatatgacgggaacccagattctgtttggggagcctgtggaggctgcctgcaagatcaaggacagaatccgtaaggagctgggattcacagtgaatgtggggatttcctgcaataaatttctggccaagatggcctcggattttcagaagccggacagggtacacactctttttccagaggagatcccacagaagatgtggccgttgtccgtgagtgagctgctgttcgttggcacagccacctctaaaaaactggagtccatgggaattcataccataggggagctggcggcaacgcctgtggaggtgctgcgttatcattttaaaaagcagggcgagagcatgtggaagtttgccaacggcaaggacttttccctggtccatgcccagcctgagcctaacaaaggctatggaaacagtaccaccatcagctttaatgtgacagacccacaggaggcaaggaccgtgcttctggccctggcggaatcggtgtcctaccgcctgcgtaaggaccatgtgaagattcaggtggtcagtgtaagtataaaggatgacaagcttcacagagtttcccatcagaaggtgctggatactcccacggacataaccaacgaaatttatcaggcagcctgcgggctttttgaggagctgtgggacggcagccctataaggctccttggtatccagaccagcaggacagaggaggaaggggaaacgatccgtcagatgtctttgtttgatgagcaggattatgaaaagtgggagcatatggacaaagccgtggacaaaatccggcaaaagtttggcaaagaagcagtgaagcgggcatcccttatgaaaaaggagggtgtgagcacagctttttccatccggcatcaggactgaattccgcaatacaggaggggagctgcaatacaggggggagctttaatacagggggagctttaatacaggaggggaagtctcaatacaggacagaaattctgtaggcagggtggaaatctaatatataggccagattcccacaataggcaggagaagatatacggaggaatagaatacacaaggtcagcggaaactattgtgaaaaggaaagacatgaggtggatccatgaaaaaattatattataacggaacaattctcaccatggaaaaagaccgggaggcagaggcagttctcaccagagacggaaagatccagtttgcagg
